(19) United States
(12) Patent Application Publication
(10) Pub. No.: US 2004/0067499 A1
(43) Pub. Date: Apr. 8, 2004

(54) Novel g protein-coupled receptor

(76) Inventors: Tatsuya Haga, Zushi-shi, Kanagawa (JP); Shigeki Takeda, Yokohama-shi (JP); Shigeki Takeda, Kokubunj-shi, Tokyo (JP)

Correspondence Address: VENABLE, BAETJER, HOWARD AND CIVILETTI, LLP, P.O. BOX 34385, WASHINGTON, DC, 20043-9998, US

(21) Appl. No.: 10/343,650

(22) PCT Filed: Jul. 30, 2001
(86) PCT No.: PCT/IB01/01446

(30) Foreign Application Priority Data
Aug. 4, 2000 (JP) 2000-237818

(51) Int. Cl. C12Q 1/68; G01N 33/53; G06F 19/00; G01N 33/48; G01N 33/50

(52) U.S. Cl. 435/6; 435/7.1; 702/19

(57) ABSTRACT

The present invention provides a method by which, novel G protein-coupled receptor (GPCR) genes or GPCR proteins which could discover the biocommunication system or identify novel target proteins for medicine can be searched for cyclopaedically on a data base. The method comprises the steps of: extracting open reading frames (ORFs) comprising 250 to 1000 amino acid residues from the human genome data; eliminating ORFs derived from repeated sequences of DNA, ORFs with substantial undetermined amino acids, and ORFs in which any single amino acid residue comprising more than 20% of the whole sequence; extracting ORFs having 6 to 8 transmembrane segments using SOSUI; and searching the obtained ORFs for genes homologous to known GPCR genes, preferably, genes wherein their highest homologous genes in homology search are GPCR genes or GPCR associated genes.

### TECHNICAL FIELD

[0001] The present invention relates to a method by which a novel G protein-coupled receptor gene and a novel G protein-coupled receptor protein can be searched for cyclopaedically on a data base, a novel G protein-coupled receptor gene and a novel G protein-coupled receptor obtained by said method, and a screening method of an endogenous and an exogenous ligand such as an agonist or an antagonist of said gene and protein.

### BACKGROUND ART

[0002] G protein-coupled receptors (GPCRs), which exist on the cell membrane, are proteins receiving various extracellular information. GPCRs comprise superfamilies having a common structure of seven transmembrane segments. It is known that each GPCR works as a sensor to physical senses such as light, odor, and taste, or, by binding to extracellular ligands such as hormones, neurotransmitters, biologically active substances, and local mediater and the like, changes conformation of these receptors, activates a G protein (GTP-binding protein) such as Gi, Gt, Gs, Go, Gq, and G12, and transmits signals to the intercellular space. Further, extracellular ligands, which control complex internal functions of cells and organs of various living organisms, are utilized as pharmaceuticals to control vital functions. It is considered that 30-50% of the presently used clinical medicines are ligands targeting GPCRS. Recently, the development of the gene cloning technology has made it possible to find many genes of “Orphan GPCRs ” whose ligands have not yet been identified and the search for novel GPCRs and the elucidation of the function are required. Cloning of these novel GPCR genes are considered to be useful to search for ligands specific to GPCRs, such as agonists and antagonists and the like. However, not all of GPCRs have been clarified.

[0003] On the other hand, SOSUI (http://sosui.proteome.bio.tuat.ac.jp/sosuiframeO.html) is a program developed to predict transmembrane segments from the primary structure of proteins using a hydrophobic parameter and the like of each amino acid. SOSUI has already been applied to predict the structure of many known and unknown proteins, and also used to identify a translation segment (ORF: open reading frame) which encodes a membrane-bound protein on the genome gene sequence.

[0004] GPCRs and their endogenous ligands are expected to be applicable to the research of medicines acting on them, and to the novel therapies, such as the application to gene therapies using said gene and its mutant. Moreover, analysis of novel GPCR genes is expected to lead to discover a new biocommunication system, as well as to identify a novel target protein for medicine. The object of this invention is to provide a searching method by which novel GPCR genes or GPCR proteins, which enable to discover a biocommunication system or identify a novel target protein for medicine, can be searched for cyclopaedically on a data base.

### DISCLOSURE OF THE INVENTION

[0005] In order to attain the above-mentioned object, after having attempted several methods to search for GPCR genes cyclopaedically on a database, the inventors of the present invention extracted translation segments (ORFs: Open Reading Frames) which could be candidates for GPCR genes from the human genome data, using the structural feature that GPCRs have seven transmembrane segments, and the fact that many known GPCR genes have no introns in their translation segments, then analyzed the extracts by SOSUI. Further, undetermined bases in the genome sequence were made to be translated into most possible amino acids that could become transmembrane segments, when translating into the amino acids. Analysis by SOSUI has a possibility of interpreting a signal peptide of GPCRs as a transmembrane segment, or not recognizing seventh transmembrane segment as a transmembrane segment due to its tendency of low hydrophobicity in the structure of GPCRs. Taking these into consideration, ORFs which were predicted to have 6 to 8 transmembrane segments were finally selected as candidates for GPCRs, and it is found that novel GPCR genes can be identified by the homology search of these candidate genes and known GPCR genes. The present invention has thus been completed.

[0006] The present invention relates to a searching method of a G protein-coupled receptor gene and/or a G protein-coupled receptor protein characterized in extracting an open reading frame comprising 200 to 1500 amino acid residues and having 6 to 8 transmembrane segments from the genome data derived from a human, and in searching for a gene homologous to a known G protein-coupled receptor gene from the obtained open reading frame (claim 1), the searching method of a G protein-coupled receptor gene and/or a G protein-coupled receptor protein according to claim 1, wherein an open reading frame derived from a repeated sequence of DNA, an open reading frame with substantial undetermined amino acids, and an open reading frame in which any single amino acid residue comprising more than 20% of the whole sequence are eliminated, when extracting the open reading frame (claim 2), the searching method of a G protein-coupled receptor gene and/or a G protein-coupled receptor protein according to claim 1 or 2, wherein a gene homologous to a known G protein-coupled receptor gene is a G protein-coupled receptor gene or a G protein-coupled receptor associated gene (claim 3), the searching method of a G protein-coupled receptor gene and/or a G protein-coupled receptor protein according to any one of claims 1 to 3, wherein a G protein-coupled receptor contains an endogenous ligand (claim 4), the searching method of a G protein-coupled receptor gene and/or a G protein-coupled receptor protein according to claim 4, wherein a G protein-coupled receptor containing an endogenous ligand is a G protein-coupled receptor other than an odorant receptor or a taste receptor (claim 5), the searching method of a G protein-coupled receptor gene and/or a G protein-coupled receptor protein according to claim 4, wherein a G protein-coupled receptor containing an endogenous ligand is a G protein-coupled receptor of an odorant receptor (claim 6), and the searching method of a G protein-coupled receptor gene and/or a G protein-coupled receptor protein according to claim 4, wherein a G protein-coupled receptor containing an endogenous ligand is a G protein-coupled receptor of a taste receptor (claim 7).

[0007] The present invention also relates to a G protein-coupled receptor gene obtainable by the searching method of a G protein-coupled receptor gene and/or a G protein-coupled receptor protein according to any one of claims 1 to 7 (claim 8), a gene which encodes a G protein-coupled receptor protein (a) or (b) described below; (a) a G protein-coupled receptor protein comprising an amino acid sequence represented by Seq. ID No.2n (n=any one of integral numbers 1 to 51), (b) a G protein-coupled receptor protein comprising an amino acid sequence where one or a few amino acids are deficient, substituted or added in an amino acid sequence represented by Seq. ID No.2n (n=any one of integral numbers 1 to 51) (claim 9), DNA which encodes a G protein-coupled receptor protein comprising DNA which contains a base sequence represented by Seq. ID No. 2n-1 (n=any one of integral numbers 1 to 51) or its complementary sequence and a part or the whole of these sequences (claim 10), DNA which hybridizes with DNA comprising the gene according to claim 10 under a stringent condition, and encodes a G protein-coupled receptor protein (claim 11), a gene which encodes a G protein-coupled receptor protein (a) or (b) described below; (a) a G protein-coupled receptor protein comprising an amino acid sequence represented by Seq. ID No. 2n (n=any one of integral numbers 52 to 332), (b) a G protein-coupled receptor protein comprising an amino acid sequence where one or a few amino acids are deficient, substituted or added in an amino acid sequence represented by Seq. ID No. 2n (n=any one of integral numbers 52 to 332) (claim 12), DNA which encodes a G protein-coupled receptor protein comprising DNA which contains a base sequence represented by Seq. ID No. 2n-1 (n=any one of integral numbers 52 to 332) or its complementary sequence and a part or the whole of these sequences (claim 13), DNA which hybridizes with DNA comprising the gene according to claim 13 under a stringent condition, and encodes a G protein-coupled receptor protein (claim 14), a gene which encodes a G protein-coupled receptor proteins (a) or (b) described below; (a) a G protein-coupled receptor protein comprising an amino acid sequence represented by Seq. ID No. 2n (n=any one of integral numbers 333 to 347), (b) a G protein-coupled receptor protein comprising an amino acid sequence where one or a few amino acids are deficient, substituted or added in an amino acid sequence represented by Seq. ID No. 2n (n=any one of integral numbers 333 to 347) (claim 15), DNA which encodes a G protein-coupled receptor protein comprising DNA which contains a base sequence represented by Seq. ID No. 2n-1 (n=any one of integral numbers 333 to 347) or its complementary sequence and a part or the whole of these sequences (claim 16), and DNA which hybridizes with DNA comprising the gene according to claim 16 under a stringent condition, and encodes a G protein-coupled receptor protein (claim 17).

[0008] The present invention also relates to a G protein-coupled receptor protein obtainable by the searching method of a G protein-coupled receptor gene and/or a G protein-coupled receptor protein according to any one of claims 1 to 7 (claim 18), a G protein-coupled receptor protein comprising an amino acid sequence represented by Seq. ID No. 2n (n=any one of integral numbers 1 to 51) (claim 19), a G protein-coupled receptor protein comprising an amino acid sequence where one or a few amino acids are deficient, substituted or added in an amino acid sequence represented by Seq. ID No. 2n (n=any one of integral numbers 1 to 51) (claim 20), a G protein-coupled receptor protein comprising an amino acid sequence represented by Seq. ID No. 2n (n=any one of integral numbers 52 to 332) (claim 21), a G protein-coupled receptor protein comprising an amino acid sequence where one or a few amino acids are deficient, substituted or added in an amino acid sequence represented by Seq. ID No. 2n (n=any one of integral numbers 52 to 332) (claim 22), a G protein-coupled receptor protein comprising an amino acid sequence represented by Seq. ID No. 2n (n=any one of integral numbers 333 to 347) (claim 23), a G protein-coupled receptor protein comprising an amino acid sequence where one or a few amino acids are deficient, substituted or added in an amino acid sequence represented by Seq. ID No. 2n (n=any one of integral numbers 333 to 347) (claim 24), a partial peptide of a G protein-coupled receptor protein obtainable by the searching method of a G protein-coupled receptor gene and/or a G protein-coupled receptor protein according to any one of claims 1 to 7 (claim 25), and the partial peptide according to claim 25, wherein a G protein-coupled receptor protein is the G protein-coupled receptor protein according to any one of claims 19 to 22 (claim 26).

[0009] The present invention also relates to a fusion protein or a fusion peptide constructed by binding the G protein-coupled receptor protein according to claim 18 or the partial peptide of the G protein-coupled receptor protein according to claim 25 to a marker protein and/or a peptide tag (claim 27), the fusion protein according to claim 27, wherein the G protein-coupled receptor protein is the G protein-coupled receptor protein according to any one of claims 19 to 24 (claim 28), an antibody which specifically binds to the G protein-coupled receptor protein according to claim 18 (claim 29), the antibody according to claim 29, wherein the G protein-coupled receptor protein is the G protein-coupled receptor protein according to any one of claims 19 to 24 (claim 30), a host cell containing an expression system which can express the G protein-coupled receptor protein according to claim 18 (claim 31), the host cell according to claim 31, wherein the G protein-coupled receptor protein is the G protein-coupled receptor protein according to any one of claims 19 to 24 (claim 32), a non-human animal wherein its function of a gene which encodes the G protein-coupled receptor protein according to claim 18 is deficient or said protein overexpresses on its chromosome (claim 33), the non-human animal according to claim 33, wherein the G protein-coupled receptor protein is the G protein-coupled receptor protein according to any one of claims 19 to 24 (claim 34), and the non-human animal according to claim 33 or 34, wherein the non-human animal is a mouse (claim 35).

[0010] The present invention also relates to a screening method of a promoter or a suppressor of a G protein-coupled receptor function, or of a G protein-coupled receptor expression characterized in using the G protein-coupled receptor protein according to any one of claims 18 to 24, the partial peptide according to claim 25 or 26, or a cell membrane which expresses said protein or the partial peptide, and a test substance (claim 36), a screening method of a promoter or a suppressor of a G protein-coupled receptor function, or of a G protein-coupled receptor expression characterized in using the G protein-coupled receptor protein according to any one of claims 18 to 24, the partial peptide according to claim 25 or 26, or a cell membrane which expresses said protein or the partial peptide, a G protein or a partial peptide of a G protein, and a test substance (claim 37), a screening method of a promoter or a suppressor of a G protein-coupled receptor function, or of a G protein-coupled receptor expression characterized in using a cell expressing the G protein-coupled receptor protein according to any one of claims 18 to 24 or the partial peptide according to claim 25 or 26, and a test substance (claim 38), the screening method of a promoter or a suppressor of a G protein-coupled receptor function, or of a G protein-coupled receptor expression according to any one of claims 36 to 38, wherein a cell which expresses the G protein-coupled receptor protein according to any one of claims 18 to 24 or the partial peptide according to claim 25 or 26 is the host cell according to claim 31 or 32 (claim 39), and a screening method of a promoter or a suppressor of a G protein-coupled receptor function, or of a G protein-coupled receptor expression characterized in using the non-human animal according to any one of claims 33 to 35, and a test substance (claim 40).

[0011] The present invention also relates to a promoter or a suppressor of a G protein-coupled receptor function, or of a G protein-coupled receptor expression obtainable by the screening method of a promoter or a suppressor of a G protein-coupled receptor function, or of a G protein-coupled receptor expression according to any one of claims 36 to 40 (claim 41), the promoter or the suppressor of a G protein-coupled receptor function, or of a G protein-coupled receptor expression according to claim 41, wherein the promoter or the suppressor of a G protein-coupled receptor function, or of a G protein-coupled receptor expression is a ligand for a G protein-coupled receptor (claim 42), a medical constituent characterized in being used for a medical treatment for a patient who needs elevation of the function or enhancement of the expression of a G protein-coupled receptor, and containing the protein according to any one of claims 18 to 24, the partial peptide according to claim 25 or 26, or the promoter of a G protein-coupled receptor function or expression according to claim 41 or 42 as an active component (claim 43), and a medical constituent characterized in being used for a medical treatment for a patient who needs suppression of the function or the expression of a G protein-coupled receptor, and containing the protein according to any one of claims 18 to 24, the partial peptide according to claim 25 or 26, or the suppressor of a G protein-coupled receptor function or expression according to claim 41 or 42 as an active component (claim 44).

[0012] The present invention also relates to a diagnostic method for diseases relating to the function or the expression of a G protein-coupled receptor characterized in comparing a DNA sequence encoding a G protein-coupled receptor protein in a sample to a DNA sequence encoding the protein according to any one of claims 18 to 24 (claim 45), a diagnostic probe for diseases relating to the function or the expression of a G protein-coupled receptor comprising the whole or a part of an anti sense strand of DNA or RNA encoding the protein according to any one of claims 18 to 24 (claim 46), and a diagnostic drug for diseases relating to the function or the expression of a G protein-coupled receptor characterized in containing the diagnostic probe according to claim 46 and/or the antibody according to claim 29 or 30 (claim 47).

### BEST MODE OF CARRYING OUT THE INVENTION

[0013] The searching method of GPCR genes and/or GPCR proteins of the present invention is not limited in particular, as far as it comprises a searching method characterized in extracting open reading frames comprising 200 to 1500 amino acid residues and having 6 to 8 transmembrane segments from the genome data derived from a human, and in searching the obtained open reading frames for genes homologous to known GPCR genes, preferably genes which are GPCR genes or GPCR associated genes, and more preferably genes which are GPCR genes containing endogenous ligands. It is preferable, however, to eliminate open reading frames derived from repeated sequences of DNA, open reading frames with substantial undetermined amino acids, or open reading frames comprising more than 20% of identical amino acid, when extracting open reading frames. In order to extract open reading frames with 6 to 8 transmembrane segments, the above-mentioned program, for example, such as SOSUI, which was developed to predict transmembrane segments of amino acids from the primary structure of proteins using a hydrophobic parameter and the like of each amino acid, can be used. Additionally, in order to search for homologous genes, the known homology search system, such as BLAST, can be used.

[0014] As GPCR genes of the present invention, any GPCR genes obtained from the above-mentioned homology search can be used and the examples are genes which encode GPCR proteins other than odorant receptors and taste receptors comprising an amino acid sequence represented by Seq. ID No.2n (n=any one of integral numbers 1 to 51), genes which encode GPCR proteins of odorant receptors comprising an amino acid sequence represented by Seq. ID No. 2n (n=any one of integral numbers 52 to 332), genes which encode GPCR proteins of taste receptors comprising an amino acid sequence represented by Seq. ID No. 2n (n=any one of integral numbers 333 to 347), and genes which encode GPCR proteins comprising an amino acid sequence where one or a few amino acids are deficient, substituted or added in an amino acid sequence represented by Seq. ID No.2n (n=any one of integral numbers 1 to 347). Said GPCR genes can be prepared based on their DNA sequence data. For example, GPCR genes derived from a human can be prepared from a human gene library or a human cDNA library and the like by publicly known methods.

[0015] As DNA which encodes GPCR proteins of the present invention, the examples are DNA which contains a base sequence represented by Seq. ID No. 2n-1 (n=any one of integral numbers 1 to 347) or its complementary sequence and a part or the whole of these sequences, and DNA which hybridizes with various DNA libraries under a stringent condition by using said DNA as a probe, and encodes GPCR proteins. As the hybridization condition to obtain said DNA, for instance, a hybridization at 42.degree. C., and a rinse with a buffer containing 1×SSC and 0.1% SDS at 42. degree. C. are exemplified, and more preferably, a hybridization at 65.degree. C., and a rinse with a buffer containing 1×SSC and 0.1% SDS at 65.degree. C. are exemplified. In addition, there are various factors which influence the stringency of hybridization besides the above-mentioned temperature condition, and one skilled in the art can construct the same level of stringency as the above exemplified hybridization stringency, by combining various factors accordingly.

[0016] As GPCR proteins of the present invention, any GPCR proteins obtained by the above-mentioned screening method can be used, and the specific examples are GPCR proteins other than odorant receptors and taste receptors comprising an amino acid sequence represented by Seq. ID No. 2n (n=any one of integral numbers 1 to 51), GPCR proteins of odorant receptors comprising an amino acid sequence represented by Seq. ID No. 2n (n=any one of integral numbers 52 to 332), GPCR proteins of taste receptors comprising an amino acid sequence represented by Seq. ID No. 2n (n=any one of integral numbers 333 to 347), GPC.R proteins comprising an amino acid sequence where one or a few amino acids are deficient, substituted or added in an amino acid sequence represented by Seq. ID No.2n (n=any one of integral numbers 1 to 347), and recombinant proteins of said proteins. Further, partial peptides of the above-mentioned GPCR proteins, which are objects of the present invention, are not limited in particular, as far as they comprise a part of the above-mentioned GPCR proteins, and contain an amino acid sequence which recognizes or specifically binds to various G proteins. The above-mentioned objects of the present invention, that is, GPCR proteins, partial peptides of GPCR proteins, and recombinant proteins and peptides to which the antibody, which specifically binds to GPCR proteins and partial peptides of GPCR proteins, specifically binds, may be generically called hereafter as “the protein and the peptide of the present invention”. The protein and the peptide of the present invention can be prepared by publicly known methods based on their DNA sequence data, and the origin is not limited in particular.

[0017] As fusion proteins and fusion peptides of the present invention, any fusion proteins and fusion peptides constructed by binding the protein and the peptide of the present invention to a marker protein and/or a peptide tag can be used. As marker proteins, any conventional marker proteins can be used and the specific examples are alkaline phosphatase, Fc region of an antibody, HRP, and GFP. Conventionally known peptide tags, such as Myc tag, His tag, FLAG tag, GST tag, are exemplified as specific examples of peptide tags of the present invention. Said fusion proteins can be constructed by usual methods, and are useful for the purification of GPCR proteins utilizing the affinity between Ni-NTA and His tag, the detection of GPCR proteins, the quantitation of the antibody to GPCR proteins, and as an investigational reagent and the like in the field concerned.

[0018] As the antibody that specifically binds to the protein and the peptide of the present invention, an immunospecific antibody such as a monoclonal antibody, a polyclonal antibody, a chimeric antibody, a single stranded antibody, a humanized antibody and the like are concretely exemplified. Although these antibodies can be constructed by usual methods using a protein such as the above-mentioned GPCR proteins or a part of the protein, or the like as an antigen, a monoclonal antibody is more preferable among them because of its specificity. Said antibody which specifically binds to GPCR proteins, such as a monoclonal antibody or the like, are useful, for instance, for the diagnosis of diseases derived from the mutation or the defect of GPCR proteins, and for elucidation of molecular mechanism of GPCR proteins.

[0019] The antibody of the present invention can be developed by administering fragments containing the protein and the peptide of the present invention or their epitopes, or cells that express said proteins or peptides on the surface of the membrane, to animals (preferably excluding human) with usual protocol. For instance, the monoclonal antibody can be prepared by an arbitrary method which brings antibodies developed by cultured materials of continuous cell line, such as hybridoma method (Nature 256, 495-497, 1975), trioma method, human B-cell hybridoma method (Immunology Today 4, 72, 1983), and EBV-hybridoma method (MONOCLONAL ANTIBODIES AND CANCER THERAPY, pp. 77-96, Alan R. Liss, Inc., 1985). Taking GPCR proteins derived from a mouse as examples of the protein and the peptide of the present invention, the preparing method of the monoclonal antibody that specifically binds to GPCR proteins derived from a mouse, in other word, anti-m GPCR (mouse GPCR) monoclonal antibody is now explained.

[0020] The above-mentioned anti-mGPCR monoclonal antibody can be produced by culturing the hybridoma developing anti-mGPCR monoclonal antibody by usual methods in vivo or in vitro. In the in vivo system, for instance, said antibody can be obtained by intraperitoneal culturing in a rodent, preferably in a mouse or a rat, and in the in vitro system, by culturing in an animal cell culture medium. The cell culture media such as RPMI1640 or MEM containing antibiotics such as streptomycin and penicillin can be illustrated as media to culture hybridoma in the in vitro system.

[0021] The hybridoma developing anti-m GPCR monoclonal antibody can be produced, for instance, by immunizing a BALB/c mouse with GPCRs obtained from a mouse and the like, cell-fusing spleen cells of the immuned mouse with a mouse NS-1 cell (ATCC TIB-18) by usual methods, and then screening by the immunnofluorescence dye pattern. As the separation and the purification method of said monoclonal antibody, any conventional methods used for purification of a protein can be used and the liquid chromatography, such as affinity chromatography, is concretely exemplified.

[0022] Further, in order to develop a single stranded antibody to the above-mentioned protein and the peptide of the present invention, the preparation method of a single stranded antibody (U.S. Pat. No. 4,946,778) can be applied. Further, in order to express a humanized antibody, it is possible to use transgenic mice, other mammalian animals or the like, to isolate and identify the clones which express the protein and the peptide of the present invention with the above-mentioned antibody, and to purify its polypeptide by affinity chromatography. The antibody to the protein and the peptide of the present invention and the peptide containing their antigen epitopes are useful for elucidation of the molecular mechanism of GPCR proteins. The recombinant protein or the recombinant peptide to which these antibodies specifically bind are also included in the protein and the peptide of the present invention as described above.

[0023] Further, the function of the protein and the peptide of the present invention can be analyzed by using the fusion protein constructed by fusing the antibody, such as the above-mentioned anti-mGPCR monoclonal antibody and the like, with a fluorescent substance, for instance, such as FITC (fluorescein isothiocyanate), tetramethyl rhodamine isocyanate or the like, a radioisotope such as ¹²⁵I, ³²P, ¹⁴C, ³⁵S, ³H or the like, an labeled product with an enzyme such as alkaline phosphatase, peroxidase, β-galactosidase, phycoerythrin or the like, or a fluorescent and luminescent protein such as a green fluorescent protein (GFP). Further, the methods such as RIA, ELISA, the fluorescence antibody technique, the plaque forming cell assay, the spot test, the hemagglutination method, and the Ouchterlony method and the like can be exemplified as the immunological method for measurement.

[0024] The present invention also relates to a host cell containing an expression system which can express the protein and the peptide of the present invention. The gene which encodes the protein and the peptide of the present invention can be introduced into a host cell by a number of methods described in many standard laboratory manuals such as by Davis et al. (BASIC METHODS IN MOLECULAR BIOLOGY, 1986), and by Sambrook et al. (MOLECULAR CLONING: A LABORATORY MANUAL, 2nd Ed., Cold Spring Harbor Laboratory Press, Cold Spring Harbor, N.Y., 1989) and so on. Examples of those methods include calcium phosphate transfection, DEAE-dextran-mediated transfection, transvection, microinjection, cationic lipid-mediated transfection, electroporation, transduction, scrape loading, ballistic introduction and infection. Examples of the host cells include bacterial procaryotic cells such as Escherichia coli, Streptomyces, Bacillus subtilis, Streptococcus, Staphylococcus and the like; fungous cells such as yeast, Aspergillus and the like; insect cells such as drosophila S2, spodptera Sf9 and the like; and animal or plant cells such as L cells, CHO cells, COS cells, HeLa cells, C127 cells, BALB/c3T3 cells (including mutant strains deficient in dihydrofolate reductase, thymidine kinase or the like), BHK21 cells, HEK293 cells, Bowes melanoma cells, oocytes and the like.

[0025] As the expression system, any expression systems which can express the protein and the peptide of the present invention in the host cell can be used, and the examples include expression systems derived from chromosome, episome and virus, such as; expression systems derived from bacterial plasmid and yeast plasmid; vectors derived from papovavirus like SV40, vaccinia virus, adenovirus, chicken pox virus, pseudorabies virus, and retrovirus; and vectors derived from bacteriophage, transposon, and the combination of these, for instance, vectors derived from genetic factors of plasmid, such as cosmid or phagemid, and bacteriophage. These expression systems may contain a regulatory sequence which acts not only as a promoter but also as a controller of the expression.

[0026] The host cell containing the above-mentioned expression system, the cell membrane of said host cell, and the protein and the peptide of the present invention obtainable by the cultivation of said host cell can be used in the screening method of the present invention as hereinafter described. For example, the method of F. Pietri-Rouxel et al. (Eur. J. Biochem., 247, 1174-1179, 1997) or the like can be used as the method to obtain cell membranes, and publicly known methods including ammonium sulfate or ethanol precipitation, acid extraction, anion or cation exchange chromatography, phosphocellulose chromatography, hydrophobic-interaction chromatography, affinity chromatography, hydroxyapatite chromatography, and lectin chromatography, preferably high-speed liquid chromatography can be used to collect the protein and the peptide of the present invention from cell cultured material and then purify them. In particular, as columns used for affinity chromatography, there are columns to which the antibody to the protein and the peptide of the present invention, such as the anti-GPCR monoclonal antibody and the like, is bound, or in case that a normal peptide tag is added to the protein and the peptide of the present invention, there are columns to which materials having affinity to said peptide tag is bound. The protein and the peptide of the present invention can be obtained by using these columns. The above-mentioned purification method of the protein and the peptide of the present invention can also be applied in the peptide synthesis.

[0027] In the present invention, a non-human animal overexpressing the above-mentioned protein and the peptide of the present invention means a non-human animal which produces larger amount of the protein and the peptide of the present invention than a wild-type non-human animal does. In addition, a non human animal whose function of a gene encoding the protein and the peptide of the present invention is deficient on its chromosome means a non-human animal wherein a part or the whole of a gene encoding the protein and the peptide of the present invention on its chromosome is inactivated by gene mutation such as disruption, deficiency, substitution, etc. and function of expressing the protein and the peptide of the present invention is lost. Though specific examples of a non-human animal of the present invention include rodents and the like, such as rabbits, mice, rats etc., a non-human animal of the present invention is not limited to these animals.

[0028] A Homozygous non-human animal generated according to Mendelian ratio includes a deficient type or an overexpression type of the protein and the peptide of the present invention, and their littermate wild-type. It is possible to carry out precise comparative experiments in individual level by using the deficient type or the overexpression type and the littermate wild-type of these homozygous non-human animals at the same time. Therefore, it is preferable to use the wild-type non-human animals, in other words, those of the same species, more preferably the littermates, of the non-human animals being deficient in or overexpressing the function of a gene which encodes the protein and the peptide of the present invention on their chromosome at the same time, for example, in the screening of the present invention hereinafter described. The generating method of the non-human animals being deficient in or overexpressing the function of a gene which encodes the protein and the peptide of the present invention on their chromosome will be explained below, with examples of knockout mice and transgenic mice of GPCR proteins.

[0029] For example, a mouse deficient in the function of a gene which encodes GPCR proteins on its chromosome, in other words, a knockout mouse of GPCR proteins can be constructed as follows. A gene which encodes the above-mentioned GPCR proteins is screened by using a gene fragment obtained from mouse gene library by a method like PCR. The screened gene which encodes GPCR proteins is subcloned with a viral vector or the like and specified by DNA sequencing. A target vector is constructed by substituting the whole or a part of the gene of this clone which encodes GPCR proteins with pMC1 neo gene cassette or the like, and by introducing a diphteria toxin A fragment (DT-A) gene, a herpes simplex virus thymidine kinase (HSV-tk) gene or other such genes into 3′-terminal side.

[0030] This constructed target vector is linearized and introduced into ES cells by electroporation or the like to induce homologous recombination. The ES cells wherein homologous recombination is induced by an antibiotic such as G418, ganciclovir (GANC) or the like are selected from the homologous recombinants. It is preferable to confirm whether the selected ES cells are the objected recombinants by Southern blot analysis or the like. A chimeric mouse is constructed by microinjecting a clone of the confirmed ES cells into a blastocyst of a mouse and then transplanting the blastocyst into a recipient mouse. A heterozygous mouse can be obtained by intercrossing the chimeric mouse with a wild-type mouse, and a knockout mouse of GPCR proteins of the present invention can be constructed by intercrossing the heterozygous mice. It is possible to confirm whether a knockout mouse of GPCR proteins is constructed, for example, by isolating RNA from the mouse obtained by the above-mentioned method and examining it by Northern blot analysis or the like, or by examining the expression of the mouse by Western blot analysis or the like.

[0031] A transgenic mouse of GPCR proteins can be generated in following procedures. A transgene is constructed by fusing chicken β-actin, mouse neurofilament, SV40 or other such promoters, and rabbit β-globin, SV40 or other such poly A or introns with cDNA encoding GPCR proteins. The transgene is microinjected into the pronucleus of a fertilized egg of a mouse, and the obtained egg cell is cultured, then transplanted into the oviduct of a recipient mouse. After rearing up the recipient animal, baby mice with the above-mentioned cDNA are selected from the mice born from the recipient animal. Thus transgenic mice can be generated. The baby mouse with cDNA can be selected by extracting crude DNA from a tail or the like of a mouse, then carrying out methods like dot hybridization using the introduced gene encoding GPCR proteins as a probe, PCR method using a specific primer, and the like.

[0032] Examples of the screening method of the promoter or the suppressor of the function of the protein and the peptide of the present invention, such as GPCRs of the present invention include: a method characterized in using the above-mentioned protein and the peptide of the present invention or a cell membrane which expresses the protein and the peptide of the present invention and a test substance; a method characterized in using the above-mentioned protein and the peptide of the present invention or a cell membrane which expresses the protein and the peptide of the present invention, the G protein and a test substance; a method characterized in using a cell which expresses the protein and the peptide of the present invention and a test substance; a method characterized in using a non-human animal, such as a knockout mouse or a transgenic mouse of the protein and the peptide of the present invention and a test substance.

[0033] One example of the screening method characterized in using the above-mentioned protein and the peptide of the present invention or a cell membrane which expresses the protein and the peptide of the present invention and a test substance is a method wherein the protein and the peptide of the present invention or the protein and the peptide of the present invention expressed on the surface of a cell membrane is made to contact with a test substance, and then the binding condition of the protein and the peptide of the present invention or the protein and the peptide of the present invention expressed on the surface of a cell membrane and a test substance is measured and evaluated. One example of the method characterized in using the above-mentioned protein and the peptide of the present invention or a cell membrane which expresses the protein and the peptide of the present invention, the G protein and a test substance is a method wherein the protein and the peptide of the present invention or the protein and the peptide of the present invention expressed on the surface of the cell membrane and the G protein is made to contact with a test substance, and then the interaction of the protein and the peptide of the present invention or the protein and the peptide of the present invention expressed on the surface of the cell membrane with the G protein is measured and evaluated.

[0034] Examples of the method characterized in using a non-human animal, such as a knockout mouse or a transgenic mouse of the protein and the peptide of the present invention and a test substance include: a method wherein a cell which expresses the protein and the peptide of the present invention derived from said non-human animals is made to contact, in advance, with a test substance in vitro, and said cell which expresses the protein and the peptide of the present invention is cultivated in the presence of the G protein, and then the reaction to the G protein in the cell which expresses the protein and the peptide of the present invention is measured and evaluated; a method wherein a cell which expresses the protein and the peptide of the present invention derived from the above-mentioned non-human animals is made to contact, in advance, with the G protein in vitro, and the cell which expresses the protein and the peptide of the present invention is cultivated in the presence of a test substance, and then the reaction to the G protein, such as the binding condition to the G protein and the like, in the cell which expresses the protein and the peptide of the present invention is measured and evaluated; a method wherein a test substance is administered in advance to the above-mentioned non-human animals, and a cell which expresses the protein and the peptide of the present invention derived from the non-human animals is cultivated in the presence of the G protein, and then the reaction to the G protein in the cell which expresses the protein and the peptide of the present invention is measured and evaluated.

[0035] The promoter or the suppressor of the function or the expression of the protein and the peptide of the present invention, such as ligands of GPCR and the like, can be obtained by the above-mentioned screening methods. The medical constituent of the present invention is not limited in particular, as far as it comprises the protein and the peptide of the present invention and the promoter or the suppressor of the function or the expression of the protein and the peptide of the present invention as an active component. These medical constituents can be used for medical treatment for a patient who needs promotion of the function or the expression of the protein and the peptide of the present invention, or for a patient who needs suppression of the function or the expression of the protein and the peptide of the present invention. In addition, the diagnostic method for diseases relating to the function or the expression of the protein and the peptide of the present invention is not limited in particular, as far as it comprises a comparison of a DNA sequence encoding the GPCR protein of the present invention in a sample with the above-mentioned DNA sequence encoding the GPCR protein of the present invention. The diagnostic probe for diseases relating to the function or the expression of the protein and the peptide of the present invention is not limited in particular, as far as it comprises the whole or a part of the above-mentioned antisense chain of DNA or RNA encoding the GPCR protein of the present invention. The diagnostic drug for diseases relating to the function or the expression of the protein and the peptide of the present invention is not limited in particular, as far as it contains the above-mentioned diagnostic probe or the above-mentioned antibodies.

[0036] The present invention is now explained in more detail with examples, but the scope of the present invention is not limited to these examples.

[0037] GPCR genes other than odorant and taste receptors so far reported were examined whether they contained introns or not. 95 GPCR genes were confirmed not to contain introns and 63 GPCR genes were confirmed to contain introns. Therefore, about 60% of GPCR genes are predicted that they have no introns. In addition, the presence of introns in human odorant and taste receptors has not yet been reported. Thus, GPCRs without introns were searched for as hereinafter described.

[0038] [Extraction of Putative GPCR Genes from the Human Genome Data]

[0039] Open reading frames (ORF), which could be the candidates of GPCR genes, were extracted from the human genome data as of Aug. 18, 2000, and analyzed by SOSUI. As this human genome data used contains the same undetermined sequences duplicately, it consists of about 4.5G base pairs while the entire human genome consists of about 3G base pairs. About 210,000 ORFs consisting of DNA encoding 200-1500 amino acid residues were extracted from the human genome data, and among them, 130,000 ORFs were obtained by eliminating ORFs considered to be derived from repeated sequences of DNA, ORFs comprising substantial undetermined amino acids, or ORFs in which any single amino acid residue comprising more than 20% of the whole sequence. Prior to analyze these 130,000 ORFs by SOSUI, the efficiency of SOSUI analysis was examined.

[0040] [Efficiency of SOSUI Analysis]

[0041] Analysis by SOSUI has a possibility of interpreting a signal peptide of GPCRs as a transmembrane segment, or not recognizing seventh transmembrane segment as a transmembrane segment due to its tendency of low hydrophobicity in the structure of GPCRs. Therefore, the efficiency of SOSUI in searching for GPCRs was first checked by analyzing the amino acid sequences of known GPCRs by SOSUI. 207 GPCRs other than odorant and taste receptors so far reported were analyzed by SOSUI, and the analysis result was that 95% of them, 197 GPCRs, had 6 to 8 transmembrane segments. 43 odorant receptors were also analyzed in the same way, and the analysis result that 77% of them, 33 GPCRs, had 6 to 8 transmembrane segments was obtained. Therefore, the prediction ability of SOSUI was considered to be about 95% for GPCRs other than odorant and taste receptors, and about 77% for odorant receptors. The above-mentioned 207 GPCRs other than taste and odorant receptors so far reported which had been downloaded from the website http://www.gpcr.org/7tm/seq/dna.html, and the genes of odorant receptors which had been downloaded from the website http://ycmi.med.yale.edu/senselab/ORDB were used.

[0042] [Homology (BLAST) Search]

[0043] After SOSUI analysis of the above-mentioned 130,000 ORFs, 1150 ORFs having 6 to 8 transmembrane segments were obtained. The sequences of 1150 ORFs of the obtained GPCR candidates were referred to the “nr” data base as of Aug. 20, 2000 using BLAST and analyzed for their homology to known GPCRs. As a result, 522 ORFs homologous to known GPCRs were obtained. Then, by removing duplicated ORFs from the above-mentioned sequences, 203 known odorant receptor genes, 11 known taste receptor genes, and 64 registered GPCR genes other than odorant and taste receptors were able to be identified. On the other hand, novel GPCR genes other than odorant and taste receptors, novel GPCR genes of odorant receptors, or novel GPCR genes of taste receptors, all of which have homology to known GPCR genes were obtained by BLAST search.

[0044] [Amino Acid Sequence Analysis]

[0045] The amino acid sequences of the above-mentioned novel GPCR genes obtained by BLAST search were analyzed. As to the amino acid sequence analysis, SPORT was used to identify signal sequences in addition to the above-mentioned SOSUI, and then it is examined if lengths of the loop between the transmembrane segments were appropriate or not. As to the gene sequences, in order to judge the possibility that ORFs could be pseudogenes, the existence of TATAbox or CpGisland in the upstream of ORFs was examined. Consequently, 51 ORFs presumed to be novel GPCRs other than odorant and taste receptors, 281 ORFs presumed to be novel GPCRs of odorant receptors, 218 of which contain sequences specific to odorant receptors, and 15 ORFs presumed to be novel GPCRs of taste receptors were confirmed. The base sequences of the above-mentioned 51 novel GPCRs other than odorant and taste receptors are represented in Seq. ID No. 2n-1 (n=any one of integral numbers 1 to 51), and the amino acid sequences of the novel GPCR proteins encoded by these 51 novel GPCR genes are represented in Seq. ID No. 2n (n=any one of integral numbers 1 to 51). The base sequences of novel GPCR genes of 281 odorant receptors are represented in Seq. ID No. 2n-1 (n=any one of integral numbers 52 to 332), and the amino acid sequences of the novel GPCR proteins of these 281 odorant receptors are represented in Seq. ID No. 2n (n=any one of integral numbers 52 to 332). The base sequences of novel GPCR genes of 15 taste receptors are represented in Seq. ID No. 2n-1 (n=any one of integral numbers 333 to 347), and the amino acid sequences of the novel GPCR proteins of these 15 taste receptors are represented in Seq. ID No. 2n (n=any one of integral numbers 333 to 347).

[0046] The proteins having the highest homology to the transmembrane segments (TM) of the above-mentioned 347 novel GPCR proteins at the amino acid level are hereinafter described. A figure following to TM represents the number of the transmembrane segment, followed by a numeric range which shows the number of amino acid residues which consist in the transmembrane segment in the sequence listing, (P) following to the number of the amino acid residues in the sequence listing shows extremely clear characteristic as a transmembrane segment, and (S) shows weaker characteristic as a transmembrane segment. Further, figures following to the name of the proteins having the highest homology at the amino acid level represent the accession number, and the counts of the amino acids which completely correspond and their ratios (%) to all amino acids are also shown. Further, when expression sites were able to be confirmed by RT-PCR, the expression sites are described after that.

[0047] Seq. ID. No. 2 [TM1;26-50(P), TM2;59-83(P), TM3;92-116(P), TM4;130-154(P), TM5;168-192(P), TM6;203-227(P), TM7;241-265(P)]

[0048] retinoic acid induced 3 (putative G protein-coupled receptor)(AF095448);138/290 (47%)

[0049] Spleen, lung, heart, liver, kidney, pancreas, small intestine, colon

[0050] Seq. ID. No. 4 [TM1;17-40(S), TM2;66-88(P), TM3;99-123(S), TM4;138-162(S), TM5;222-246(P), TM6;256-280(P)] hypothetical protein P1.11659_{—}3-human(AC004472);302/307 (98%)

[0051] Heart, colon

[0052] Seq. ID. No. 6 [TM1;1-21(S), TM2;92-116(P), TM3;126-148(P), TM4;177-197(S), TM5;207-231(S), TM6;255-279(P), TM7;298-322(P)]

[0053] putative chemokine receptor; GTP-binding protein(PROTEIN-COUPLED RECEPTOR HM74)(D10923);122/294 (41%)

[0054] Seq. ID. No. 8 [TM1;18-42(P), TM2;49-73(S), TM3;100-120(S), TM4:138-162(P), TM5;178-202(S), TM6;219-243(P)]

[0055] putative chemokine receptor; GTP-binding protein(PROTEIN-COUPLED RECEPTOR HM74)(D10923);178/341 (52%)

[0056] Seq. ID. No. 10 [TM1;31-55(P), TM2;65-89(P), TM3;99-123(S), TM4;154-178(P), TM5;194-218(P), TM6;242-266(S), TM7;274-298(P)]

[0057] FML1_GORGO FMLP-RELATED RECEPTOR I (X97738);90/324 (27%) Seq. ID. No. 12 [TM1;24-48(P), TM2;69-90(S), TM3;96-120(S), TM4;135-159(P), TM5;186-210(P), TM6;231-251(P), TM7;277-301(P)]

[0058] P2Y5_CHICK P2Y PURINOCEPTOR 5 (P2Y5) (protein-coupled receptor)(L06109);113/284 (39%)

[0059] Seq. ID. No. 14 [TM1;37-61(P), TM2;80-102(S), TM3;118-142(P), TM4;150-174(P), TM5;200-222(P), TM6;240-264(P)]

[0060] purinergic receptor P2Y, G-protein coupled 1 (U22829);109/299 (36%)

[0061] Brain, spleen, lung, liver, colon

[0062] Seq. ID. No. 16 [TM1;27-51(P), TM2;69-93(P), TM3;103-124(S), TM4;144-168(P), TM5;185-209(P), TM6;223-247(P), TM7;267-291(S)]

[0063] MAS1 oncogene (J03823);111/294 (37%)

[0064] Heart, small intestine, colon

[0065] Seq. ID. No. 18 [TM1;8-32(P), TM2;61-85(S), TM3;92-116(S), TM4;154-178(P), TM5;196-220(P), TM6;250-274(P)]

[0066] G-protein coupled receptor GPR34 (AF039686);77/323 (23%) Brain, spleen, lung, heart, lung, kidney, pancreas, stomach, small intestine, colon

[0067] Seq. ID. No. 20 [TM1;5-23(S), TM2;50-74(P), TM3;87-111(S), TM4;123-147(P), TM5;165-189(P), TM6;211-235(P)]

[0068] 5-hydroxytryptamine (serotonin) receptor ID (AB041379);72/272 (26%)

[0069] Pancreas

[0070] Seq. ID. No. 22 [TM1;2-24(P), TM2;29-53(P), TM3;64-88(S), TM4;94-117(P), TM5;213-237(P), TM6;297-321(S)]

[0071] CG2114 gene product (AE003476);71/302 (23%)

[0072] Stomach, small intestine

[0073] Seq. ID. No. 24 [TM1;37-61(P), TM2;76-100(S), TM3;113-137(P), TM4;151-175(P), TM5;189-213(P), TM6;250-274(P), TM7;290-310(S)]

[0074] sphingosine 1-phosphate receptor Edg-8 (AF223649);343/397 (86%)

[0075] Seq. ID. No. 26 [TM1;25-49(P), TM2;58-82(S), TM3;97-121(P),

[0076] TM4;138-162(P), TM5;184-208(P), TM6;233-254(P), TM7;274-293(S)]

[0077] gene product; putative G-protein-coupled receptor; G protein coupled receptor for UDP-glucose (D13626);149/314 (47%) Brain, spleen, heart, stomach, colon

[0078] Seq. ID. No. 28 [TM1;39-63(P), TM2;72-96(S), TM3;148-170(P), TM4;202-225(P), TM5;248-272(P), TM6;286-310(S)]

[0079] GALS_MOUSE GALANIN RECEPTOR TYPE 2 (AF042784);109/299 (36%)

[0080] Pancreas

[0081] Seq. ID. No. 30 [TM1;43-67(P), TM2;79-103(P), TM3;113-137(P), TM4;154-174(S), TM5;206-230(P), TM6;287-311(P), TM7;324-345(S)]

[0082] PROBABLE G PROTEIN-COUPLED RECEPTOR (D43633);179/429 (41%) Seq. ID. No. 32 [TM1;135-157(S), TM2;161-184(P), TM3;191-215(P), TM4;230-254(P), TM5;266-290(P), TM6;318-342(P)] seven transmembrane receptor (AB019120);71/302 (23%)

[0083] Seq. ID. No. 34 [TM1;43-67(P), TM2;79-103(P), TM3;113-137(P), TM4;154-178(S), TM5;206-230(P), TM6;280-302(P), TM7;312-336(P)]

[0084] PROBABLE G PROTEIN-COUPLED RECEPTOR (D43633);125/312 (40%) Seq. ID. No. 36 [TM1;38-62(P), TM2;89-113(S), TM3;118-142(P), TM4;164-188(P), TM5;208-232(P), TM6;248-272(S), TM7;276-298(S)]

[0085] G-protein coupled receptor SALPR; somatostatin and angiotensin-like (G-protein coupled receptor SALPR) (D88437);141/322 (43%)

[0086] Kidney, small intestine

[0087] Seq. ID. No. 38 [TM1;7-31(P), TM2;42-66(S), TM3;79-103(S), TM4;120-144(P), TM5;159-183(P), TM6;224-248(P), TM7;264-288(S)]

[0088] DOPI_DROME DOPAMINE RECEPTOR 1 PRECURSOR (D-DOP1) (X77234);95/350 (27%)

[0089] Seq. ID. No. 40 [TM1;3-27(S), TM2;36-60(P), TM3;64-87(S), TM4;94-116(S), TM5;213-231(S), TM6;251-273(P)] cadherin EGF LAG seven-pass G-type receptor (AF031572);40/112 (35%)

[0090] Seq. ID. No. 42 [TM1;27-51(S), TM2;103-122(S), TM3;139-160(P), TM4;180-204(S), TM5;221-245(P), TM6;263-281(S)]

[0091] RTA_RAT PROBABLE G PROTEIN-COUPLED RECEPTOR RTA (M35297);120/332 (36%)

[0092] Seq. ID. No. 44 [TM1;28-52(P), TM2;63-87(P), TM3;95-117(P), TM4;141-165(P), TM5;179-203(P), TM6;216-240(P), TM7;252-276(S)]

[0093] MASI oncogene (J03823);108/283 (38%)

[0094] Spleen, lung, colon

[0095] Seq. ID. No. 46 [TM1;18-42(S), TM2;96-120(P), TM3;140-164(P), TM4;178-202(P), TM5;318-342(P), TM6;353-374(S)] (AE003422) EG:22E5.11 gene product (AE003422);98/364. (26%)

[0096] Lung

[0097] Seq. ID. No. 48 [TM1;12-36(P), TM2;47-71(S), TM3;97-121(P), TM4;133-157(S), TM5;183-207(P), TM6;226-250(P)]

[0098] frizzled 6 (AB012911);286/314 (91%)

[0099] Seq. ID. No. 50 [TM1;16-40(P), TM2;45-69(S), TM3;80-104(P), TM4;116-138(S), TM5;164-188(S), TM6;278-302(P), TM7;354-378(P)]

[0100] unnamed protein product (AK000922);286/370 (77%)

[0101] Seq. ID. No. 52 [TM1;64-88(P), TM2;98-120(P), TM3;122-146(S), TM4;172-196(P), TM5;213-237(S), TM6;253-277(P), TM7;284-308(P)]

[0102] putative pheromone receptor V2R2 (AF053989);250/327 (76%)

[0103] Nose

[0104] Seq. ID. No.54 [TM1;84-106(P), TM2;110-132(P), TM3;136-158(P), TM4;173-194(P), TM5;200-224(P), TM6;230-251(P), TM7;267-291(P)]

[0105] insulin-like growth factor I, brain-specific—Thai catfish (A53697);28/88 (31%)

[0106] Seq. ID. No.56 [TM1;90-114(S), TM2;117-140(S), TM3;151-168(S), TM4;174-198(P), TM5;209-233(S), TM6;238-262(P)]

[0107] hypothetical protein T06E4.7—Caenorhabditis elegans (Z70756);25/67 (37%)

[0108] Lung

[0109] Seq. ID. No. 58 [TM1;40-64(P), TM2;71-95(S), TM3;124-148(P), TM4;153-177(P), TM5;204-228(P), TM6;243-265(P), TM7;283-307(S)]

[0110] cysteinyl leukotriene receptor 1 (AF119711);114/298 (38%) Seq. ID. No. 60 [TM1;16-38(P), TM2;51-73(P), TM3;91-113(P), TM4;133-155(S), TM5;178-199(P), TM6;271-293(S)]

[0111] G protein-coupled seven-transmembrane receptor(D43633);117/365 (32%)

[0112] Seq. ID. No. 62 [TM1;17-39(S), TM2;67-89(P), TM3;101-123(S), TM4;135-157(P), TM5;178-196(S), TM6;202-221(S)]

[0113] allatostatin receptor(AF163775);43/154 (27%)

[0114] Lung, heart, pancreas, small intestine

[0115] Seq. ID. No. 64 [TM1;9-31(S), TM2;48-70(S), TM3;92-114(S), TM4;207-229(S), TM5;269-290(P), TM6;315-337(P), TM7;348-370(P)]

[0116] pheromone receptor VN3(U36895);84/277 (30%)

[0117] Nose

[0118] Seq. ID. No. 66 [TM1;118-140(P), TM2;153-175(S), TM3;199-221(S), TM4;236-258(P), TM5;281-303(P), TM6;326-348(P), TM7;362-384(P)]

[0119] G protein-coupled receptor LGR5(AF061444);120/269 (44%) Seq. ID. No. 68 [TM1;33-54(S), TM2;97-119(P), TM3;168-190(S), TM4;264-286(P), TM5;291-313(S), TM6;405-427(P)]

[0120] interleukin 9 receptor precursor(L39064);30/105 (28%)

[0121] Seq. ID. No. 70 [TM1;5-27(P), TM2;55-76(S), TM3;85-107(P), TM4;126-148(S), TM5;164-186(P), TM6;267-289(P), TM7;304-326(S)]

[0122] pheromone receptor VN6(U36898);99/310 (31%)

[0123] Nose

[0124] Seq. ID. No. 72 [TM1;1-21(S), TM2;27-43(S), TM3;51-73(S), TM4;92-114(S), TM5;131-153(S), TM6;183-205(P)]

[0125] pheromone receptor 1(Y12725);64/155 (41%)

[0126] Nose

[0127] Seq. ID. No. 74 [TM1;20-42(P), TM2;50-72(S), TM3;84-106(P), TM4;123-144(P), TM5;167-189(S), TM6;228-250(P), TM7;259-281(S)]

[0128] putative G-Protein coupled receptor, EDG6(AJ000479);81/268 (30%)

[0129] Skeletal muscle

[0130] Seq. ID. No. 76 [TM1;21-43(P), TM2;55-77(P), TM3;100-122(S), TM4;136-158(P), TM5;181-203(P), TM6;227-247(P), TM7;270-272(S)]

[0131] putative purinergic receptor P2Y10(AF000545);148/292 (50%) Seq. ID. No. 78 [TM1;24-46(P), TM2;57-79(P), TM3;98-120(P), TM4;136-158(P), TM5;189-211(P), TM6;234-255(P), TM7;280-300(S)]

[0132] KIAA0001 gene product(D13626);140/295 (47%)

[0133] Brain, thymus, lung, kidney, stomach, colon

[0134] Seq. ID. No. 80 [TM1;1-23(P), TM2;36-58(S), TM3;249-271(P), TM4;296-318(P), TM5;332-354(P), TM6;368-390(P), TM7;412-434(P), TM8;458-480(S)]

[0135] seven transmembrane receptor(AB019120);191/487 (39%) Seq. ID. No. 82 [TM1;5-25(S), TM2;80-97(S), TM3;103-124(P), TM4;133-155(P), TM5;165-187(S), TM6;217-239(P)]

[0136] unnamed protein product(AK000922);304/357 (85%) Seq. ID. No. 84 [TM1;16-34(S), TM2;216-238(P), TM3;247-269(S), TM4;285-307(S), TM5;367-389(P), TM6;403-425(P)]

[0137] seven transmembrane receptor(AB019120);95/326 (29%)

[0138] Seq. ID. No. 86 [TM1;1-23(S), TM2;41-63(S), TM3;95-117(P), TM4;128-150(P), TM5;157-179(P), TM6;190-212(S), TM7;216-238(P), TM8;260-282(P)]

[0139] neuropeptide Y receptor Y6(U58367);23/88 (26%)

[0140] Seq. ID. No. 88 [TM1;14-36(S), TM2;55-77(P), TM3;94-116(P), TM4;126-147(P), TM5;185-207(P), TM6;215-237(S)]

[0141] orphan G protein-coupled receptor(AF045764);199/236 (84%)

[0142] Seq. ID. No. 90 [TM1;31-53(P), TM2;69-91(P), TM3;110-132(S), TM4;195-217(P), TM5;400-422(P), TM6;434-456(P)]

[0143] G-protein coupled receptor RE2(AF091890);63/192 (32%)

[0144] Seq. ID. No. 92 [TM1;1-23(P), TM2;36-58(P), TM3;99-121(P), TM4;135-157(S), TM5;165-187(P), TM6;189-211(S), TM7;339-361(P), TM8;379-401(S)]

[0145] Frizzled-1 protein homolog(T42210);27/82 (32%)

[0146] Seq. ID. No. 94 [TM1;24-46(P), TM2;83-105(P), TM3;122-143(P), TM4;166-188(S), TM5;227-249(P), TM6;258-280(S)]

[0147] putative G-Protein coupled receptor(AJ000479);76/268 (28%)

[0148] Seq. ID. No.96 [TM1;22-44(P), TM2;113-135(P), TM3;159-181(P), TM4;203-225(S), TM5;228-250(P), TM6;272-294(S)]

[0149] Frizzled-10(AB027464);23/96 (23%)

[0150] Seq. ID. No. 98 [TM1;11-33(S), TM2;41-63(S), TM3;71-93(S), TM4;96-118(P), TM5;122-144(S), TM6;146-165(S)]

[0151] beta3-adrenergic receptor(AF109930);39/120 (32%)

[0152] Seq. ID. No. 100 [TM1;8-29(P), TM2;31-52(P), TM3;55-73(P), TM4;79-100(P), TM5;110-132(S), TM6;147-169(P), TM7;177-199(P), TM8;201-222(P)]

[0153] putative pheromone receptor V2R1(AF053985);51/219 (23%)

[0154] Seq. ID. No. 102 [TM1;6-28(P), TM2;60-82(S), TM3;90-111(S), TM4;127-149(P), TM5;181-203(S), TM6;237-259(P)]

[0155] pheromone receptor VN6(U36898);79/236 (33%)

[0156] Seq. ID. No. 104 [TM1;5-27(S), TM2;41-63(P), TM3;82-104(S), TM4;106-128(P), TM5;153-175(S), TM6;191-213(P), TM7;235-257(P), TM8;289-311(S)]

[0157] odorant receptor S19(AF121976);106/228 (46%)

[0158] Seq. ID. No. 106 [TM1;1-23(S), TM2;44-66(S), TM3;85-106(P), TM4;149-171(P), TM5;183-205(S), TM6;217-238(S)]

[0159] odorant receptor S18(AF121975);159/222 (71%)

[0160] Seq. ID. No. 108 [TM1;3-25(P), TM2;96-118(S), TM3;120-142(S), TM4;149-171(P), TM5;182-204(P), TM6;211-231(P)]

[0161] odorant receptor A16(AB030896);122/244 (50%)

[0162] Seq. ID. No. 110 [TM1;31-53(P), TM2;64-86(S), TM3;100-122(S), TM4;138-160(P), TM5;171-193(S), TM6;199-221(P)]

[0163] olfactory receptor-like protein COR3′beta(L17432);106/217 (48%)

[0164] Seq. ID. No. 112 [TM1;30-52(P), TM2;65-87(P), TM3;105-127(S), TM4;134-156(S), TM5;203-225(P), TM6;243-265(P), TM7;272-294(S)]

[0165] odorant receptor S18(AF121975);184/303 (60%)

[0166] Seq. ID. No. 114 [TM1;29-51(P), TM2;59-81(S), TM3;99-121(S), TM4;144-166(P), TM5;179-201(S), TM6;204-225(P), TM7;242-264(P), TM8;269-291(S)]

[0167] odorant receptor MOR83(AB030894);155/306 (50%)

[0168] Seq. ID. No. 116 [TM1;4-26(S), TM2;32-53(P), TM3;65-87(P), TM4;99-121(S), TM5;123-144(P), TM6;162-184(S), TM7;189-211(P)]

[0169] odorant receptor MOR83(AB030894);121/226 (53%)

[0170] Seq. ID. No. 118 [TM1;26-48(P), TM2;61-83(S), TM3;98-120(S), TM4;141-163(S), TM5;204-225(P), TM6;239-261(P)]

[0171] odorant receptor MOR83(AB030894);156/303 (51%)

[0172] Seq. ID. No. 120 [TM1;25-47(P), TM2;57-79(S), TM3;88-109(S), TM4;131-153(P), TM5;201-223(P), TM6;242-264(S)]

[0173] CfOLF1(U53679);107/235 (45%)

[0174] Seq. ID. No. 122 [TM1;29-51(S), TM2;83-105(P), TM3;114-136(P), TM4;149-171(S), TM5;192-214(S), TM6;259-281(P), TM7;294-316(P)]

[0175] odorant receptor S51(AF121981);127/159 (79%)

[0176] Seq. ID. No. 124 [TM1;35-57(P), TM2;68-90(P), TM3;96-118(S), TM4;147-169(S), TM5;210-232(P), TM6;246-268(P), TM7;278-300(S)]

[0177] MOR 3Beta1(AF133300);119/308 (38%)

[0178] Seq. ID. No. 126 [TM1;15-37(S), TM2;64-86(P), TM3;93-115(S), TM4;141-163(S), TM5;206-228(P), TM6;237-259(P)]

[0179] odorant receptor S51(AF121981);85/128 (66%)

[0180] Seq. ID. No. 128 [TM1;6-28(S), TM2;32-53(P), TM3;59-81(S), TM4;97-119(S), TM5;145-167(P), TM6;205-226(P), TM7;236-258(P), TM8;268-290(S)]

[0181] similar to rat olfactory receptor OR18(AC004908);209/311 (67%)

[0182] Seq. ID. No. 130 [TM1;1-23(S), TM2;28-50(P), TM3;63-85(S), TM4;142-163(P), TM5;203-225(P), TM6;238-260(P), TM7;271-293(P)]

[0183] olfactory receptor-like protein COR3′beta(L17432);147/299 (49%)

[0184] Seq. ID. No. 132 [TM1;31-53(S), TM2;63-85(S), TM3;99-121(S), TM4;149-171(P), TM5;205-227(P), TM6;244-266(S), TM7;273-295(P)]

[0185] putative G-protein coupled receptor RAlc(AF079864);142/299 (47%)

[0186] Seq. ID. No. 134 [TM1;1-23(S), TM2;26-48(S), TM3;51-73(S), TM4;85-107(S), TM5;151-172(P), TM6;182-204(P), TM7;212-234(S)]

[0187] odorant receptor S19(AF121976);142/246 (57%)

[0188] Seq. ID. No. 136 [TM1;11-33(S), TM2;37-59(P), TM3;71-93(P), TM4;107-129(P), TM5;151-173(S), TM6;207-229(P), TM7;249-271(P)]

[0189] olfactory receptor-like protein COR3′beta(L17432);134/306 (43%)

[0190] Seq. ID. No. 138 [TM1;11-32(S), TM2;49-71(S), TM3;91-113(P), TM4;128-150(S), TM5;170-192(P), TM6;231-253(P), TM7;268-290(S), TM8;312-334(S)]

[0191] olfactory receptor-like protein COR3′beta(L17432);149/313 (47%)

[0192] Seq. ID. No. 140 [TM1;1-23(S), TM2;30-52(P), TM3;67-89(S), TM4;102-124(S), TM5;137-159(S), TM6;202-224(P), TM7;239-261(P), TM8;271-293(P)]

[0193] olfactory receptor-like protein COR3′beta(L17432);156/298 (52%)

[0194] Seq. ID. No. 142 [TM1;2-24(S), TM2;33-55(P), TM3;69-91(P), TM4;106-128(S), TM5;142-164(S), TM6;208-230(P), TM7;244-266(S), TM8;276-298(S)]

[0195] putative G-protein coupled receptor RAlc(AF079864);171/305 (56%)

[0196] Seq. ID. No. 144 [TM1;31-53(P), TM2;65-87(P), TM3;141-163(S), TM4;183-205(P), TM5;212-234(P), TM6;240-262(P), TM7;273-295(S)]

[0197] olfactory receptor 64(AF071080);161/302 (53%)

[0198] Seq. ID. No. 146 [TM1;6-28(P), TM2;42-64(S), TM3;87-109(P), TM4;144-166(P), TM5;183-205(P), TM6;217-237(S)]

[0199] olfactory receptor-like protein COR3′beta(L17432);129/249 (51%)

[0200] Seq. ID. No. 148 [TM1;1-18(P), TM2;43-65(S), TM3;67-88(S), TM4;99-121(S), TM5;136-158(S), TM6;175-197(P)]

[0201] putative G-protein coupled receptor RAlc(AF079864);73/151 (48%)

[0202] Seq. ID. No. 150 [TM1;31-53(P), TM2;66-88(P), TM3;104-126(S), TM4;141-163(S), TM5;205-227(P), TM6;246-268(S), TM7;274-296(S)]

[0203] odorant receptor S18(AF121975);142/308 (46%)

[0204] Seq. ID. No. 152 [TM1;6-26(S), TM2;29-51(P), TM3;53-75(P), TM4;97-119(S), TM5;133-155(S), TM6;202-224(P), TM7;237-259(P), TM8;269-291(S)]

[0205] putative G-protein coupled receptor RAlc(AF079864);298/318 (93%)

[0206] Seq. ID. No. 154 [TM1;1-23(S), TM2;29-51(P), TM3;67-89(P), TM4;104-126(S), TM5;145-166(S), TM6;206-228(P), TM7;244-266(S), TM8;277-298(S)]

[0207] putative G-protein coupled receptor RAlc(AF079864);157/301 (52%)

[0208] Seq. ID. No. 156 [TM1;18-40(P), TM2;44-65(P), TM3;69-91(S), TM4;115-137(P), TM5;154-176(P), TM6;214-236(P), TM7;255-277(P), TM8;282-304(S)]

[0209] putative G-protein coupled receptor RAlc(AF079864);184/307 (59%)

[0210] Seq. ID. No. 158 [TM1;30-52(P), TM2;58-80(S), TM3;83-105(S), TM4;204-226(P), TM5;240-262(P), TM6;274-296(S)]

[0211] putative G-protein coupled receptor RAlc(AF079864);180/299 (60%)

[0212] Seq. ID. No. 160 [TM1;2-24(S), TM2;30-52(P), TM3;64-86(S), TM4;100-122(S), TM5;141-163(S), TM6;204-226(P), TM7;273-295(S)]

[0213] odorant receptor S18(AF121975);164/303 (54%)

[0214] Seq. ID. No. 162 [TM1;30-52(P), TM2;64-86(P), TM3;102-124(S), TM4;142-164(S), TM5;205-227(P), TM6;241-263(S), TM7;273-295(S)]

[0215] odorant receptor S18(AF121975);166/305 (54%)

[0216] Seq. ID. No. 164 [TM1;33-55(P), TM2;67-89(P), TM3;104-126(S), TM4;146-168(P), TM5;214-236(S), TM6;246-268(P), TM7;276-298(S)]

[0217] odorant receptor S19(AF121976);140/304 (46%)

[0218] Seq. ID. No. 166 [TM1;14-36(S), TM2;42-64(P), TM3;78-100(S), TM4;115-137(P), TM5;153-174(S), TM6;217-239(P)]

[0219] odorant receptor S18(AF121975);209/248 (84%)

[0220] Seq. ID. No. 168 [TM1;36-58(P), TM2;68-90(P), TM3;103-125(P), TM4;146-168(S), TM5;208-230(P), TM6;245-267(P), TM7;275-297(S)]

[0221] odorant receptor S18(AF121975);123/298 (41%)

[0222] Seq. ID. No. 170 [TM1;31-53(S), TM2;63-85(P), TM3;100-122(S), TM4;140-162(S), TM5;204-226(P), TM6;239-260(P)]

[0223] MOR 3′Beta1(AF133300);103/259 (39%)

[0224] Seq. ID. No. 172 [TM1;29-51(P), TM2;63-85(P), TM3;99-121(S), TM4;143-165(S), TM5;177-199(S), TM6;204-226(S)]

[0225] putative G-protein coupled receptor RAlc(AF079864);112/247 (45%)

[0226] Seq. ID. No. 174 [TM1;10-32(P), TM2;44-66(P), TM3;73-93(S), TM4;128-150(S), TM5;158-179(S), TM6;181-203(P)]

[0227] olfactory receptor(AF179805);27/101 (26%)

[0228] Seq. ID. No. 176 [TM1;5-27(P), TM2;46-68(S), TM3;85-107(S), TM4;123-145(S), TM5;154-176(P), TM6;182-204(S), TM7;216-237(S)]

[0229] odorant receptor S18(AF121975);149/250 (59%)

[0230] Seq. ID. No. 178 [TM1;1-23(S), TM2;28-50(S), TM3;96-118(S), TM4;134-156(S), TM5;196-218(P), TM6;238-260(P), TM7;269-291(S)]

[0231] putative G-protein coupled receptor RAlc(AF079864);172/307 (56%)

[0232] Seq. ID. No. 180 [TM1;6-28(S), TM2;40-62(P), TM3;72-94(S), TM4;111-133(S), TM5;158-180(P), TM6;214-236(P), TM7;252-274(P), TM8;283-305(S)]

[0233] olfactory receptor-like protein COR3′beta(L17432);167/304 (54%)

[0234] Seq. ID. No. 182 [TM1;29-51(S), TM2;65-87(S), TM3;108-130(S), TM4;144-165(P), TM5;201-223(P), TM6;240-262(P), TM7;271-293(S)]

[0235] olfactory receptor-like protein COR3′beta(L17432);153/296 (51%)

[0236] Seq. ID. No. 184 [TM1;2-24(S), TM2;30-52(P), TM3;64-86(S), TM4;105-127(S), TM5;204-226(P), TM6;240-262(P), TM7;274-296(S)]

[0237] olfactory receptor-like protein COR3′beta(L17432);150/303 (49%)

[0238] Seq. ID. No. 186 [TM1;4-26(S), TM2;35-57(P), TM3;72-94(S), TM4;115-137(S), TM5;151-172(S), TM6;191-213(P), TM7;249-271(S), TM8;281-303(S)]

[0239] MOR 3′Beta1(AF133300);157/298 (52%)

[0240] Seq. ID. No. 188 [TM1;36-58(P), TM2;74-96(P), TM3;108-130(P), TM4;149-171(S), TM5;209-231(P), TM6;260-282(P)]

[0241] MOR 3′Beta1(AF133300);123/307 (40%)

[0242] Seq. ID. No. 190 [TM1;30-52(S), TM2;67-89(S), TM3;103-125(S), TM4;205-227(P), TM5;242-264(S), TM6;269-291(S)]

[0243] MOR 3′Beta1(AF133300);172/307 (56%)

[0244] Seq. ID. No. 192 [TM1;31-53(P), TM2;56-78(S), TM3;81-103(S), TM4;107-129(S), TM5;145-167(P), TM6;184-206(P)]

[0245] putative G-protein coupled receptor RAlc(AF079864);98/210 (46%)

[0246] Seq. ID. No. 194 [TM1;34-56(P), TM2;71-93(P), TM3;108-130(S), TM4;144-166(P), TM5;191-212(P), TM6;224-246(P), TM7;251-273(S)]

[0247] odorant receptor 5.24(AF158963);168/328 (51%)

[0248] Seq. ID. No. 196 [TM1;8-30(S), TM2;53-75(P), TM3;105-127(P), TM4;139-161(S), TM5;167-189(P), TM6;200-222(P), TM7;231-253(P)]

[0249] olfactory receptor OR18(S29710);189/268 (70%)

[0250] Seq. ID. No. 198 [TM1;28-50(P), TM2;84-106(S), TM3;117-139(S), TM4;145-166(S), TM5;185-207(P), TM6;213-235(S), TM7;243-265(P), TM8;274-296(S)]

[0251] odorant receptor S19(AF121976);192/299 (64%)

[0252] Seq. ID. No. 200 [TM1;7-29(S), TM2;35-57(S), TM3;64-86(S), TM4;95-117(S), TM5;141-163(S), TM6;200-221(P)]

[0253] olfactory receptor I7-[(AF095725);95/96 (98%)

[0254] Seq. ID. No. 202 [TM1;26-48(P), TM2;62-84(S), TM3;96-118(P), TM4;141-163(S), TM5;204-225(P), TM6;239-261(P), TM7;268-290(S)]

[0255] odorant receptor MOR83(AB030894);159/301 (52%)

[0256] Seq. ID. No. 204 [TM1;31-53(P), TM2;65-87(S), TM3;104-126(S), TM4;205-227(P), TM5;243-265(S), TM6;269-291(S)]

[0257] odorant receptor S18(AF121975);163/310 (52%)

[0258] Seq. ID. No. 206 [TM1;1-23(S), TM2;27-49(P), TM3;65-87(S), TM4;108-130(S), TM5;205-227(P), TM6;242-264(S), TM7;268-290(S)]

[0259] olfactory receptor 67(AF133300);158/309 (51%)

[0260] Seq. ID. No. 208 [TM1;32-54(P), TM2;66-88(P), TM3;98-120(S), TM4;137-159(S), TM5;210-231(P), TM6;243-265(P)]

[0261] odorant receptor S51(AF121981);112/159 (70%)

[0262] Seq. ID. No. 210 [TM1;30-52(P), TM2;100-122(P), TM3;127-149(P), TM4;153-175(P), TM5;209-231(P), TM6;243-265(S), TM7;274-296(S)]

[0263] odorant receptor S46(AF121979);198/307 (64%)

[0264] Seq. ID. No. 212 [TM1;34-56(P), TM2;104-126(P), TM3;149-171(P), TM4;210-232(P), TM5;247-269(S), TM6;276-298(S)]

[0265] odorant receptor S46(AF121979);209/307 (68%)

[0266] Seq. ID. No. 214 [TM1; 3-25(S), TM2;31-53(P), TM3;106-128(P), TM4;132-154(S), TM5;156-178(S), TM6;203-225(P), TM7;242-264(P), TM8;271-293(S)]

[0267] odorant receptor S46(AF121979);174/306 (56%)

[0268] Seq. ID. No.216 [TM1;36-58(P), TM2;101-123(P), TM3;141-163(P), TM4;181-203(P), TM5;206-227(P), TM6;270-292(S)]

[0269] odorant receptor S46(AF121979);178/307 (57%)

[0270] Seq. ID. No. 218 [TM1;26-48(P), TM2;65-87(S), TM3;104-126(S), TM4;142-164(S), TM5;204-226(P), TM6;240-262(P), TM7;276-297(S)]

[0271] olfactory receptor-like protein COR3′beta(L17432);159/301 (52%)

[0272] Seq. ID. No. 220 [TM1;21-43(P), TM2;84-106(S), TM3;116-138(S), TM4;145-167(P), TM5;182-204(S), TM6;210-232(P), TM7;240-262(S), TM8;272-294(S)]

[0273] odorant receptor S46(AF121979);192/310 (61%)

[0274] Seq. ID. No. 222 [TM1;27-49(S), TM2;75-97(S), TM3;113-135(P), TM4;140-162(P), TM5;169-190(S), TM6;203-225(S)]

[0275] olfactory receptor(AJ133430);190/247 (76%)

[0276] Seq. ID. No. 224 [TM1;1-20(S), TM2;28-50(P), TM3;61-83(S), TM4;92-114(S), TM5;133-155(P), TM6;195-217(P)]

[0277] HUMAN OLFACTORY RECEPTOR 5I1(Q13606);95/214 (44%)

[0278] Seq. ID. No. 226 [TM1;27-49(P), TM2;58-80(S), TM3;93-115(S), TM4;143-165(S), TM5;178-200(S), TM6;206-227(P), TM7;241-263(P), TM8;268-290(S)]

[0279] odorant receptor MOR83(AB030894);171/307 (55%)

[0280] Seq. ID. No. 228 [TM1;25-47(P), TM2;55-77(S), TM3;100-122(S), TM4;143-165(P), TM5;170-192(S), TM6;205-226(P), TM7;241-263(P)]

[0281] odorant receptor MOR83(AB030894);158/308 (51%)

[0282] Seq. ID. No. 230 [TM1;1-23(P), TM2;27-49(S), TM3;81-103(P), TM4;143-165(P), TM5;184-206(P), TM6;214-236(P)]

[0283] olfactory receptor [Homo sapiens] (AJ003147);154/249 (61%)

[0284] Seq. ID. No. 232 [TM1;27-49(P), TM2;63-85(P), TM3;103-125(S), TM4;143-165(S), TM5;204-226(P), TM6;238-259(S), TM7;273-295(S)]

[0285] olfactory receptor P2 [Mus musculus ] (AF247657);194/302 (64%)

[0286] Seq. ID. No.234 [TM1;34-55(S), TM2;104-126(P), TM3;148-170(S), TM4;204-226(P), TM5;242-264(S), TM6;273-294(S)]

[0287] HsOLF1 [Homo sapiens] (U56420);153/304 (50%)

[0288] Seq. ID. No. 236 [TM1;22-44(S), TM2;62-84(S), TM3;97-119(P), TM4;143-165(P), TM5;207-229(P), TM6;242-263(S), TM7;278-300(S)]

[0289] olfactory receptor C6 [Mus musculus ] (AF102523);149/305 (48%)

[0290] Seq. ID. No. 238 [TM1;34-56(P), TM2;95-117(S), TM3;140-162(P), TM4;166-188(S), TM5;202-224(P), TM6;238-260(S)]

[0291] odorant receptor [Mus musculus ] (X92969);201/276 (72%)

[0292] Seq. ID. No. 240 [TM1;26-48(P), TM2;69-91(P), TM3;95-117(S), TM4;136-158(P), TM5;166-188(S), TM6;205-227(P), TM7;237-259(S), TM8;271-292(S)]

[0293] odorant receptor [Mus musculus ] (X92969);270/309 (87%)

[0294] Seq. ID. No. 242 [TM1;26-48(P), TM2;60-82(S), TM3;93-115(P), TM4;144-166(S), TM5;176-198(S), TM6;202-223(P), TM7;234-255(S), TM8;269-291(S)]

[0295] odorant receptor MOR18 [Mus musculus ] (AB030895);183/303 (60%)

[0296] Seq. ID. No. 244 [TM1;8-30(S), TM2;43-65(S), TM3;87-109(P), TM4;131-153(S), TM5;173-195(S), TM6;233-255(P), TM7;271-292(P), TM8;302-323(P)]

[0297] odorant receptor MOR18 [Mus musculus ] (AB030895);195/301 (64%)

[0298] Seq. ID. No. 246 [TM1;45-67(P), TM2;112-134(S), TM3;143-165(S), TM4;167-189(S), TM5;192-214(S), TM6;219-240(P), TM7;251-273(P), TM8;281-303(P)]

[0299] odorant receptor A16 [Mus musculus ] (AB030896);161/300 (53%)

[0300] Seq. ID. No. 248 [TM1;118-140(P), TM2;159-181(P), TM3;186-208(S), TM4;222-244(P), TM5;263-285(P), TM6;294-316(S)]

[0301] odorant receptor MOR18 [Mus musculus ] (AB030895);114/193 (59%)

[0302] Seq. ID. No. 250 [TM1;2-24(S), TM2;28-49(S), TM3;56-78(S), TM4;91-113(P), TM5;123-145(S), TM6;161-183(S), TM7;201-222(P)]

[0303] olfactory receptor OR18—rat(S29710);175/263 (66%)

[0304] Seq. ID. No. 252 [TM1;5-27(S), TM2;51-73(P), TM3;123-145(P), TM4;167-189(P), TM5;216-238(P), TM6;261-283(P), TM7;295-317(S)]

[0305] odorant receptor MOR18 [Mus musculus ] (AB030895);257/301 (85%)

[0306] Seq. ID. No.254 [TM1;28-49(S), TM2;143-165(S), TM3;176-198(S), TM4;202-223(P), TM5;235-257(P), TM6;264-286(S)]

[0307] odorant receptor MOR18 [Mus musculus ] (AB030895);169/307 (55%)

[0308] Seq. ID. No.256 [TM1;13-35(S), TM2;156-178(P), TM3;192-214(P), TM4;252-274(P), TM5;287-309(P), TM6;313-335(S)]

[0309] olfactory receptor OR18-rat(S29710);181/300 (60%)

[0310] Seq. ID. No. 258 [TM1;25-47(P), TM2;58-80(P), TM3;93-115(S), TM4;140-162(P), TM5;189-211(P), TM6;237-259(P)]

[0311] olfactory receptor OR18—rat(S29710);183/302 (60%)

[0312] Seq. ID. No. 260 [TM1;9-31(P), TM2;67-88(S), TM3;90-112(P), TM4;116-138(S), TM5;144-166(P), TM6;179-201(S), TM7;210-231(P), TM8;270-292(S)]

[0313] HsOLF1 [Homo sapiens] (U56420);166/307 (54%)

[0314] Seq. ID. No. 262 [TM1;20-42(P), TM2;60-82(S), TM3;100-122(S), TM4;146-168(P), TM5;202-224(P), TM6;242-264(S), TM7;270-292(P)]

[0315] olfactory receptor [Homo sapiens] (AF065860);159/214 (74%)

[0316] Seq. ID. No. 264 [TM1;17-39(S), TM2;91-113(S), TM3;117-139(P), TM4;144-166(P), TM5;183-205(S), TM6;208-229(P), TM7;244-265(S), TM8;274-295(S)]

[0317] HsOLF1 [Homo sapiens] (U56420);161/306 (52%)

[0318] Seq. ID. No. 266 [TM1;31-53(P), TM2;63-85(S), TM3;102-124(P), TM4;142-164(P), TM5;203-225(P), TM6;241-262(S), TM7;271-293(S)]

[0319] HsOLF1 [Homo sapiens] (U56420);180/313 (57%)

[0320] Seq. ID. No. 268 [TM1;44-66(P), TM2;70-92(S), TM3;94-116(P), TM4;152-174(P), TM5;182-204(S), TM6;210-232(P)]

[0321] olfactory receptor [Homo sapiens] (AF065860);142/216 (65%)

[0322] Seq. ID. No. 270 [TM1;45-67(P), TM2;78-100(S), TM3;116-138(P), TM4;158-180(P), TM5;193-215(P), TM6;224-245(P), TM7;258-280(S), TM8;290-311(S)]

[0323] olfactory receptor H7 [Mus musculus ] (AF102540);147/222 (66%)

[0324] Seq. ID. No. 272 [TM1;29-51(P), TM2;64-86(P), TM3;98-120(P), TM4;143-165(P), TM5;201-223(P), TM6;238-259(S), TM7;269-291(S)]

[0325] olfactory receptor C6 [Mus musculus ] (AF102523);140/302 (46%)

[0326] Seq. ID. No. 274 [TM1;26-48(P), TM2;61-83(P), TM3;98-120(P), TM4;135-157(P), TM5;196-218(P), TM6;239-260(S)]

[0327] olfactory protein [Rattus norvegicus] (M64378);115/258 (44%)

[0328] Seq. ID. No. 276 [TM1;48-70(P), TM2;91-113(S), TM3;130-152(S), TM4;176-198(S), TM5;237-259(P), TM6;299-321(S)]

[0329] HsOLF1 [Homo sapiens] (U56420);167/303 (55%)

[0330] Seq. ID. No. 278 [TM1;32-54(P), TM2;96-118(P), TM3;145-167(P), TM4;201-223(P), TM5;239-261(P), TM6;269-291(S)]

[0331] olfactory receptor OR93Gib [Hylobates lar] (AF045580); 166/304 (54%)

[0332] Seq. ID. No. 280 [TM1;7-29(P), TM2;35-57(S), TM3;70-92(P), TM4;115-137(S), TM5;177-199(P), TM6;247-268(P)]

[0333] olfactory receptor 4 [Gallus gallus ] (X94744);156/282 (55%)

[0334] Seq. ID. No.282 [TM1;38-60(P), TM2;103-125(P), TM3;132-154(P), TM4;167-189(P), TM5;207-229(P), TM6;246-267(P), TM7;278-299(P)]

[0335] olfactory receptor OR93Gib [Hylobates lar] (AF045580);161/302 (53%)

[0336] Seq. ID. No. 284 [TM1;28-50(P), TM2;98-120(P), TM3;140-162(P), TM4;210-232(P), TM5;240-262(S), TM6;272-294(S)]

[0337] olfactory receptor OR93Ch [Pan troglodytes] (AF045577);165/308 (53%)

[0338] Seq. ID. No. 286 [TM1;1-23(S), TM2;25-47(P), TM3;56-78(S), TM4;90-112(S), TM5;142-164(S), TM6;198-220(P), TM7;236-258(P), TM8;269-290(S)]

[0339] olfactory receptor P2 [Mus musculus ] (AF247657);134/302 (44%)

[0340] Seq. ID. No. 288 [TM1;93-115(S), TM2;128-150(S), TM3;161-183(P), TM4;212-234(P), TM5;264-286(P), TM6;305-327(S)]

[0341] olfactory receptor [Homo sapiens] (AJ003147);183/305 (60%)

[0342] Seq. ID. No. 290 [TM1;5-27(S), TM2;40-62(S), TM3;83-105(P), TM4;135-157(P), TM5;181-203(S), TM6;213-235(S)]

[0343] olfactory receptor [Homo sapiens] (Z98744);160/250 (64%)

[0344] Seq. ID. No. 292 [TM1;30-52(P), TM2;99-121(P), TM3;147-169(P), TM4;207-229(P), TM5;243-265(S), TM6;274-296(S)]

[0345] chick olfactory receptor 7 [Gallus gallus ] (Z79586);151/306 (49%)

[0346] Seq. ID. No. 294 [TM1;28-50(P), TM2;66-88(S), TM3;104-126(S), TM4;138-160(P), TM5;201-223(P), TM6;242-264(P), TM7;270-292(S)]

[0347] olfactory receptor 4 [Gallus gallus ] (X94744);161/310 (51%)

[0348] Seq. ID. No. 296 [TM1;20-42(P), TM2;61-83(P), TM3;95-117(S), TM4;143-165(S), TM5;177-199(S), TM6;206-227(P)]

[0349] olfactory receptor 2 [Gallus gallus ] (X94742);106/233 (45%)

[0350] Seq. ID. No. 298 [TM1;26-48(P), TM2;62-84(S), TM3;104-126(P), TM4;142-164(P), TM5;207-228(P), TM6;271-293(S), TM7;306-328(P)]

[0351] odorant receptor [Mus musculus ] (X92969);145/302 (48%)

[0352] Seq. ID. No. 300 [TM1;7-29(S), TM2;53-75(P), TM3;101-123(S), TM4;132-154(S), TM5;163-185(P), TM6;198-220(S)]

[0353] dJ88J8.1 (novel 7 transmembrane receptor (rhodopsin family) (olfactory receptor like) protein) (hs6M1-15)) [Homo sapiens] (AL035402);173/261 (66%)

[0354] Seq. ID. No. 302 [TM1;19-41(S), TM2;83-105(S), TM3;164-186(S), TM4;203-225(P), TM5;239-260(S), TM6;272-293(S)]

[0355] olfactory receptor [Homo sapiens] (Z98744);253/310 (81%)

[0356] Seq. ID. No. 304 [TM1;8-30(S), TM2;51-73(S), TM3;94-116(P), TM4;172-194(P), TM5;201-223(S), TM6;232-254(S)]

[0357] olfactory receptor 4 [Gallus gallus ] (X94744);126/267 (47%)

[0358] Seq. ID. No. 306 [TM1;32-54(P), TM2;62-84(S), TM3;134-156(P), TM4;206-228(P), TM5;245-267(S), TM6;276-298(S)]

[0359] chick olfactory receptor 4 [Gallus gallus ] (Z79593);154/309 (49%)

[0360] Seq. ID. No. 308 [TM1;41-63(P), TM2;73-95(S), TM3;106-128(S), TM4;147-169(P), TM5;219-241(P), TM6;287-309(S)]

[0361] HsOLF1 [Homo sapiens] (U56420);146/310 (47%)

[0362] Seq. ID. No. 310 [TM1;11-33(S), TM2;42-64(P), TM3;75-97(S), TM4;106-128(S), TM5;151-173(S), TM6;188-210(S), TM7;214-236(P), TM8;249-270(S)]

[0363] olfactory receptor P2 [Mus musculus ] (AF247657);276/315 (87%)

[0364] Seq. ID. No. 312 [TM1;15-37(S), TM2;53-75(S), TM3;84-106(S), TM4;109-131(P), TM5;161-183(P), TM6;196-218(P)]

[0365] olfactory receptor [Homo sapiens]-(AF065870);246/284 (86%)

[0366] Seq. ID. No. 314 [TM1;26-48(P), TM2;60-82(S), TM3;99-120(P), TM4;142-164(S), TM5;174-195(S), TM6;202-224(P), TM7;237-258(P), TM8;271-292(S)]

[0367] dJ80119.1 (olfactory receptor-like protein (hs6Ml-1)) [Homo sapiens] (AL022727);136/305 (44%)

[0368] Seq. ID. No. 316 [TM1;10-32(S), TM2;46-68(P), TM3;80-102(P), TM4;117-139(P), TM5;157-179(P), TM6;222-244(P), TM7;259-281(P)]

[0369] odorant receptor S19 [Mus musculus ] (AF121976);168/291 (57%)

[0370] Seq. ID. No. 318 [TM1;2-24(S), TM2;45-67(P), TM3;72-94(P), TM4;119-141(S), TM5;170-192(P), TM6;221-243(P), TM7;260-282(P), TM8;288-310(S)]

[0371] odorant receptor S19 [Mus musculus ] (AF121976);163/280 (58%)

[0372] Seq. ID. No. 320 (TM1;36-58(P), TM2;65-86(S), TM3;93-115(P), TM4;134-156(S), TM5;195-217(P), TM6;236-257(S)]

[0373] olfactory receptor-like protein [Homo sapiens] (L35475);280/316 (88%)

[0374] Seq. ID. No. 322 [TM1;28-50(P), TM2;96-118(P), TM3;141-163(S), TM4;176-198(S), TM5;207-229(P), TM6;239-260(S), TM7;273-294(S)]

[0375] olfactory receptor G3 [Mus musculus ] (AF102535);187/223 (83%)

[0376] Seq. ID. No. 324 [TM1;4-26(P), TM2;54-76(S), TM3;84-106(P), TM4;144-166(P), TM5;189-211(S), TM6;214-235(S)]

[0377] odorant receptor S25 [Mus musculus ] (AF121977);180/251 (71%)

[0378] Seq. ID. No. 326 [TM1;34-56(P), TM2;97-119(P), TM3;140-162(P), TM4;173-195(S), TM5;202-223(P), TM6;266-288(S)]

[0379] odorant receptor S25 [Mus musculus ] (AF121977);189/310 (60%)

[0380] Seq. ID. No. 328 [TM1;33-55(P), TM2;98-120(P), TM3;142-164(S), TM4;204-226(P), TM5;239-261(S), TM6;271-293(S)]

[0381] olfactory receptor P2 [Mus musculus ] (AF247657);158/309 (51%)

[0382] Seq. ID. No. 330 [TM1;19-41(P), TM2;61-83(P), TM3;95-117(P), TM4;141-163(P), TM5;201-223(P), TM6;239-260(S), TM7;272-293(S)]

[0383] odorant receptor [Mus musculus ] (X92969);156/310 (50%)

[0384] Seq. ID. No. 332 [TM1;1-23(S), TM2;33-55(P), TM3;83-105(S), TM4;118-139(P), TM5;166-188(P), TM6;226-248(P), TM7;260-282(S), TM8;292-313(S)]

[0385] HGMP07J [Homo sapiens]>gi|228481|prf∥1804351C olfactory receptor HGMP07J [Homo sapiens] (X64995);168/308 (54%)

[0386] Seq. ID. No.334 [TM1;33-55(P),TM2;104-126(P),TM3;145-167(S), TM4;207-229(P), TM5;243-265(P), TM6;276-298(P)]

[0387] olfactory receptor I7 [Mus musculus ] (AF106007);181/311 (58%)

[0388] Seq. ID. No. 336 [TM1;20-42(P), TM2;63-85(P), TM3;96-118(P), TM4;145-167(S), TM5;203-225(P), TM6;238-259(S), TM7;272-293(S)]

[0389] HGMP07J [Homo sapiens]>gi|228481|prf∥1804351C olfactory receptor HGMP07J [Homo sapiens] (X64995);160/300 (53%)

[0390] Seq. ID. No. 338 [TM1;25-47(P), TM2;61-83(S), TM3;100-122(P), TM4;144-166(P), TM5;198-220(P), TM6;236-258(S), TM7;269-291(S)]

[0391] odorant receptor MOR18 [Mus musculus] (AB030895);181/302 (59%)

[0392] Seq. ID. No. 340 [TM1;1-23(S), TM2;25-47(P), TM3;59-81(P), TM4;92-114(S), TM5;143-165(S), TM6;204-226(P), TM7;237-259(S), TM8;267-289(S)]

[0393] odorant receptor A16 [Mus musculus ] (AB030896);170/297 (57%)

[0394] Seq. ID. No. 342 [TM1;23-45(P), TM2;85-107(S), TM3;136-158(P), TM4;171-193(P), TM5;196-217(P), TM6;230-252(P), TM7;259-281(S)]

[0395] odorant receptorMOR18 [Mus musculus] (AB030895);184/297 (61%)

[0396] Seq. ID. No. 344 [TM1;4-26(P), TM2;29-51(P), TM3;87-109(P), TM4;132-154(P), TM5;200-222(P), TM6;229-250(S)]

[0397] olfactory receptor [Mus musculus ] (AJ251154);188/308 (61%)

[0398] Seq. ID. No. 346 [TM1;10-32(S), TM2;42-64(P), TM3;76-98(S), TM4;115-137(S), TM5;156-177(S), TM6;216-238(S), TM7;254-276(S), TM8;288-309(S)]

[0399] olfactory receptor-like protein COR3′beta [Gallus gallus ] (L17432);167/314 (53%)

[0400] Seq. ID. No. 348 [TM1;2-23(S), TM2;29-51(S), TM3;67-89(S), TM4;102-124(P), TM5;161-183(S), TM6;209-231(S), TM7;237-259(S)]

[0401] olfactory receptor [Homo sapiens] (Y10529);193/270 (71%)

[0402] Seq. ID. No. 350 [TM1;38-60(P), TM2;81-103(S), TM3;111-133(P), TM4;154-176(S), TM5;218-240(P), TM6;254-276(P), TM7;288-309(S)]

[0403] olfactory receptor [Mus musculus domesticus] (AF073987);183/216 (84%)

[0404] Seq. ID. No. 352 [TM1;1-23(S), TM2;30-52(P), TM3;64-86(P), TM4;103-125(S), TM5;144-165(P), TM6;208-230(P), TM7;242-264(S), TM8;276-297(S)]

[0405] odorant receptor S18 [Mus musculus ] (AF121975);219/305 (71%)

[0406] Seq. ID. No. 354 [TM1;38-60(P), TM2;71-93(P), TM3;107-129(S), TM4;152-174(S), TM5;213-235(P), TM6;248-270(S), TM7;280-302(S)]

[0407] odorant receptor S19 [Mus musculus ] (AF121976);163/288 (56%)

[0408] Seq. ID. No. 356 [TM1;28-50(P), TM2;72-94(S), TM3;112-134(P), TM4;141-163(S), TM5;221-243(P), TM6;286-308(P), TM7;326-347(S), TM8;357-379(S)]

[0409] olfactory receptor C6 [Mus musculus ] (AF102523);138/308 (44%)

[0410] Seq. ID. No. 358 [TM1;29-51(P), TM2;66-88(P), TM3;106-128(S), TM4;132-154(P), TM5;197-219(P), TM6;234-255(S), TM7;267-289(S)]

[0411] olfactory receptor C6 [Mus musculus ] (AF102523);140/310 (45%)

[0412] Seq. ID. No. 360 [TM1;1-23(S), TM2;28-50(S), TM3;64-86(P), TM4;100-122(P), TM5;166-188(P), TM6;201-222(S)]

[0413] olfactory receptor C6 [Mus musculus ] (AF102523);100/215 (46%)

[0414] Seq. ID. No. 362 [TM1;32-54(P),TM2;105-127(P),TM3;144-166(P), TM4;185-207(S), TM5;210-231(P), TM6;241-263(S), TM7;272-294(S)]

[0415] HsOLF1 [Homo sapiens] (U56420);161/310 (51%)

[0416] Seq. ID. No. 364 [TM1;19-41(P), TM2;61-83(S), TM3;90-112(P), TM4;116-138(S), TM5;145-167(S), TM6;179-201(S), TM7;210-232(P), TM8;270-292(S)]

[0417] HsOLF1 [Homo sapiens] (U56420);168/307 (54%)

[0418] Seq. ID. No. 366 [TM1;19-41(S), TM2;60-82(S), TM3;99-121(S), TM4;140-162(P), TM5;206-227(P), TM6;243-264(S), TM7;273-293(S)]

[0419] CfOLF2 [Canis familiaris] (U53680);175/308 (56%)

[0420] Seq. ID. No.368 [TM1;29-51(P),TM2;101-123(P),TM3;144-166(S), TM4;206-227(P), TM5;240-262(S), TM6;273-295(S)]

[0421] olfactory receptor OR93Ch [Pan troglodytes] (AF045577);162/313 (51%)

[0422] Seq. ID. No. 370 [TM1;23-45(P), TM2;66-87(S), TM3;94-116(S), TM4;133-155(S), TM5;200-222(P), TM6;246-268(S), TM7;276-298(S)]

[0423] CfOLF1 [Canis familiaris] (U53679);153/299 (51%)

[0424] Seq. ID. No. 372 [TM1;41-63(P),TM2;102-124(S),TM3;137-159(P), TM4;207-229(P), TM5;246-268(P), TM6;278-300(P)]

[0425] HsOLF1 [Homo sapiens] (U56420);173/306 (56%)

[0426] Seq. ID. No. 374 [TM1;7-29(S), TM2;32-53(P), TM3;60-82(S), TM4;100-122(S), TM5;144-166(P), TM6;200-222(P), TM7;235-257(S)]

[0427] similar to rat olfactory receptor OR18; similar to S29710 (PID:g423702) [Homo sapiens] (AC004908);220/311 (70%)

[0428] Seq. ID. No. 376 [TM1;1-23(S), TM2;28-50(P), TM3;59-81(S), TM4;95-117(P), TM5;142-164(P), TM6;206-228(P), TM7;239-260(P)]

[0429] similar to rat olfactory receptor OR18; similar to S29710 (PID:g423702) [Homo sapiens] (AC004908);225/291 (77%)

[0430] Seq. ID. No.378 [TM1;9-31(S), TM2;123-145(P), TM3;148-170(S), TM4;192-214(S), TM5;236-258(P), TM6;295-317(P), TM7;334-355(P), TM8;367-389(S)]

[0431] olfactory receptor OR18—rat(S29710);204/302 (67%)

[0432] Seq. ID. No. 380 [TM1;9-31(S), TM2;34-56(P), TM3;62-84(S), TM4;97-119(S), TM5;144-166(S), TM6;205-227(P), TM7;242-263(P), TM8;275-296(P)]

[0433] olfactory receptor 4 [Gallus gallus ] (X94744);173/303 (57%)

[0434] Seq. ID. No. 382 [TM1;20-42(S), TM2;62-84(S), TM3;95-117(S), TM4;146-168(S), TM5;205-226(P), TM6;237-259(S), TM7;268-290(S)]

[0435] odorant receptor MOR83 [Mus musculus ] (AB030894);156/304 (51%)

[0436] Seq. ID. No. 384 [TM1;22-44(P), TM2;62-84(S), TM3;98-120(S), TM4;144-166(P), TM5;197-219(P), TM6;237-259(S), TM7;269-291(S)]

[0437] odorant receptor MOR83 [Mus musculus ] (AB030894);159/304 (52%)

[0438] Seq. ID. No. 386 [TM1;49-71(P), TM2;77-99(S), TM3;120-142(P), TM4;173-195(S), TM5;221-243(P), TM6;260-282(P), TM7;289-311(P)]

[0439] MOR 3′Betal [Mus musculus ] (AF133300);188/310 (60%)

[0440] Seq. ID. No. 388 [TM1;17-39(P), TM2;50-72(S), TM3;82-104(P), TM4;134-156(S), TM5;167-189(S), TM6;196-217(P), TM7;224-245(S)]

[0441] olfactory receptor P2 [Mus musculus ] (AF247657);226/296 (76%)

[0442] Seq. ID. No. 390 [TM1;19-41(P), TM2;61-83(P), TM3;94-116(P), TM4;136-158(P), TM5;178-200(S), TM6;207-229(P), TM7;273-295(S)]

[0443] olfactory receptor P2 [Mus musculus ] (AF247657);170/304 (55%)

[0444] Seq. ID. No. 392 [TM1;27-49(P), TM2;62-84(P), TM3;95-117(P), TM4;135-157(P), TM5;177-199(S), TM6;207-229(P), TM7;273-295(S)]

[0445] olfactory receptor P2 [Mus musculus ] (AF247657);164/304 (53%)

[0446] Seq. ID. No. 394 [TM1;30-52(P), TM2;74-96(P), TM3;137-157(P), TM4;183-205(S), TM5;258-280(P), TM6;320-341(S)]

[0447] taste bud receptor protein TB 567 [Rattus norvegicus] (U50948);235/307 (76%)

[0448] Seq. ID. No. 396 [TM1;24-46(P), TM2;56-78(S), TM3;94-116(S), TM4;129-151(P), TM5;207-229(P), TM6;241-263(S), TM7;272-292(P)]

[0449] olfactory receptor OR14-rat(S29709);256/304 (84%)

[0450] Seq. ID. No. 398 [TM1;28-50(P), TM2;98-120(P), TM3;127-149(P), TM4;203-225(P), TM5;249-271(S), TM6;274-295(S)]

[0451] olfactory receptor OR14-rat(S29709);234/299 (78%)

[0452] Seq. ID. No. 400 [TM1;32-54(P), TM2;57-79(P), TM3;92-114(P), TM4;129-151(P), TM5;201-223(P), TM6;237-259(S)]

[0453] olfactory receptor OR14-rat(S29709);189/302 (62%)

[0454] Seq. ID. No. 402 [TM1;30-52(P), TM2;62-84(S), TM3;94-116(P), TM4;138-159(P), TM5;203-225(P), TM6;238-259(S), TM7;272-293(S)]

[0455] olfactory receptor [Rattus norvegicus] (X80671);210/305 (68%)

[0456] Seq. ID. No. 404 [TM1;26-48(P), TM2;94-116(S), TM3;129-151(S), TM4;181-203(P), TM5;208-229(P), TM6;240-262(S), TM7;271-292(S)]

[0457] olfactory receptor OR14-rat(S29709);201/300 (67%)

[0458] Seq. ID. No. 406 [TM1;28-50(P), TM2;63-85(S), TM3;93-115(P), TM4;130-152(P), TM5;202-224(P), TM6;238-259(P)]

[0459] olfactory receptor [Rattus norvegicus] (X80671);247/302 (81%)

[0460] Seq. ID. No. 408 [TM1;1-21(S), TM2;40-62(P), TM3;98-120(P), TM4;223-245(P), TM5;260-282(S), TM6;290-312(S)]

[0461] taste bud receptor protein TB 641 [Rattus norvegicus](U50949);185/297 (62%)

[0462] Seq. ID. No.410 [TM1;20-42(P), TM2;200-222(P), TM3;239-261(P), TM4;269-290(S), TM5;304-326(P), TM6;331-352(P), TM7;358-372(S)]

[0463] taste bud receptor protein TB 641 [Rattus norvegicus] (U50949);170/302 (56%)

[0464] Seq. ID. No. 412 [TM1;1-23(S), TM2;26-48(S), TM3;110-132(S), TM4;137-158(P), TM5;170-192(P), TM6;198-220(S)]

[0465] taste bud receptor protein TB 641 [Rattus norvegicus] (U50949);140/234 (59%)

[0466] Seq. ID. No. 414 [TM1;3-25(S), TM2;30-52(P), TM3;63-85(S), TM4;180-202(S), TM5;205-226(P), TM6;239-261(P), TM7;266-288(S)]

[0467] taste bud receptor protein TB 641 [Rattus norvegicus] (U50949);165/299 (55%)

[0468] Seq. ID. No. 416 [TM1;6-28(S), TM2;41-63(S), TM3;102-124(P), TM4;142-164(P), TM5;170-192(S), TM6;198-220(S)]

[0469] olfactory receptor OR18-rat(S29710);154/209 (73%)

[0470] Seq. ID. No. 418 [TM1;26-48(S), TM2;99-121(P), TM3;141-163(P), TM4;204-226(P), TM5;235-256(P), TM6;267-289(S), TM7;305-327(P)]

[0471] odorant receptor A16 [Mus musculus ] (AB030896);164/286 (57%)

[0472] Seq. ID. No. 420 [TM1;33-55(P), TM2;70-92(S), TM3;103-125(P), TM4;209-231(P), TM5;247-269(S), TM6;278-300(S)]

[0473] olfactory receptor 4 [Gallus gallus ] (X94744);159/306 (51%)

[0474] Seq. ID. No. 422 [TM1;6-28(S), TM2;31-52(P), TM3;91-113(P), TM4;137-159(S), TM5;201-223(P), TM6;239-261(S), TM7;270-292(S)]

[0475] olfactory receptor OR93Ch [Pan troglodytes] (AF045577);166/305 (54%)

[0476] Seq. ID. No. 424 [TM1;24-46(P), TM2;99-120(P), TM3;137-159(P), TM4;204-225(P), TM5;237-258(S), TM6;270-291(S)]

[0477] HsOLF1 [Homo sapiens] (U56420);154/301 (51%)

[0478] Seq. ID. No. 426 [TM1;17-39(S), TM2;72-94(S), TM3;134-156(P), TM4;203-224(P), TM5;238-260(P), TM6;269-291(S)]

[0479] olfactory receptor 2 [Gallus gallus ] (X94742);155/307 (50%)

[0480] Seq. ID. No. 428 [TM1;26-48(P), TM2;55-77(S), TM3;81-103(S), TM4;141-163(P), TM5;197-219(P), TM6;238-260(P), TM7;268-290(S)]

[0481] olfactory receptor OR18—rat(S29710);193/299 (64%)

[0482] Seq. ID. No. 430 [TM1;35-57(S), TM2;96-118(S), TM3;130-152(P), TM4;156-178(S), TM5;193-215(P), TM6;239-261(P), TM7;266-288(S), TM8;294-315(S)]

[0483] olfactory receptor OR18-rat(S29710);213/304 (70%)

[0484] Seq. ID. No. 432 [TM1;10-32(S), TM2;63-85(P), TM3;101-123(S), TM4;158-180(P), TM5;194-216(P), TM6;229-249(S)]

[0485] olfactory receptor [Rattus norvegicus] (AF010293);198/263 (75%)

[0486] Seq. ID. No. 434 [TM1;16-38(P), TM2;56-78(S), TM3;86-108(P), TM4;139-161(P), TM5;197-219(P), TM6;238-260(S), TM7;270-291(S)]

[0487] olfactory protein [Rattus norvegicus] (M64378);142/294 (48%)

[0488] Seq. ID. No. 436 [TM1;8-30(P), TM2;60-82(S), TM3;93-115(P), TM4;139-161(P), TM5;203-225(P), TM6;268-290(S)]

[0489] olfactory receptor C6 [Mus musculus ] (AF102523);149/312 (47%)

[0490] Seq. ID. No. 438 [TM1;21-43(P), TM2;89-111(S), TM3;132-154(S), TM4;199-221(P), TM5;239-260(S), TM6;269-291(S)]

[0491] olfactory receptor 2 [Gallus gallus ] (X94742);148/304 (48%)

[0492] Seq. ID. No. 440 [TM1;34-56(P), TM2;62-84(P), TM3;88-110(S), TM4;206-228(P), TM5;238-260(P), TM6;270-291(S)]

[0493] olfactory receptor 2 [Gallus gallus ] (X94742);158/307 (51%)

[0494] Seq. ID. No. 442 [TM1;23-45(S), TM2;76-98(S), TM3;134-156(S), TM4;199-221(P), TM5;240-261(S), TM6;270-291(P)]

[0495] olfactory receptor 4 [Gallus gallus ] (X94744);171/301 (56%)

[0496] Seq. ID. No. 444 [TM1;3-25(S), TM2;37-59(S), TM3;78-100(P), TM4;147-169(P), TM5;184-206(P), TM6;214-235(S)]

[0497] olfactory receptor OR93Ch [Pan troglodytes] (AF045577);134/245 (54%)

[0498] Seq. ID. No. 446 [TM1;8-30(P), TM2;33-54(P), TM3;95-117(S), TM4;126-148(P), TM5;208-230(P), TM6;271-293(S)]

[0499] olfactory receptor 4 [Gallus gallus ] (X94744);149/304 (49%)

[0500] Seq. ID. No. 448 [TM1;57-79(P), TM2;96-118(S), TM3;131-153(S), TM4;205-227(S), TM5;237-259(P), TM6;274-295(S)]

[0501] taste bud receptor protein TB 641 [Rattus norvegicus] (U50949);173/298 (58%)

[0502] Seq. ID. No. 450 [TM1;19-41(P), TM2;62-84(P), TM3;95-117(P), TM4;141-163(P), TM5;202-224(P), TM6;240-261(P), TM7;272-294(S)]

[0503] olfactory receptor C6 [Mus musculus ] (AF102523);152/300 (50%)

[0504] Seq. ID. No. 452 [TM1;31-53(P), TM2;95-117(P), TM3;125-147(P), TM4;180-202(S), TM5;208-229(P), TM6;238-260(S), TM7;272-294(P)]

[0505] olfactory receptor [Rattus norvegicus] (X80671);193/301 (64%)

[0506] Seq. ID. No. 454 [TM1;2-24(S), TM2;29-51(S), TM3;59-81(S), TM4;107-129(S), TM5;169-190(P), TM6;201-223(P)]

[0507] odorant receptor MOR83 [Mus musculus] (AB030894);156/269 (57%)

[0508] Seq. ID. No. 456 [TM1;1-21(S), TM2;40-62(P), TM3;98-120(P), TM4;223-245(P), TM5;259-281(S), TM6;298-320(P)]

[0509] taste bud receptor protein TB 641 [Rattus norvegicus] (U50949);154/249 (61%)

[0510] Seq. ID. No. 458 [TM1;25-47(P), TM2;55-77(S), TM3;97-119(S), TM4;140-162(S), TM5;200-222(P), TM6;236-258(S)]

[0511] olfactory receptor 4 [Gallus gallus ] (X94744);153/303 (50%)

[0512] Seq. ID. No. 460 [TM1;1-17(S), TM2;27-49(S), TM3;67-89(P), TM4;102-124(P), TM5;174-196(S), TM6;208-230(P), TM7;238-260(S)]

[0513] olfactory receptor [Homo sapiens] (Y10529);185/261 (70%)

[0514] Seq. ID. No. 462 [TM1;1-20(S), TM2;57-79(P), TM3;89-111(S), TM4;122-144(P), TM5;156-178(P), TM6;224-246(P)]

[0515] olfactory receptor 4 [Gallus gallus ] (X94744);122/229 (53%)

[0516] Seq. ID. No. 464 [TM1;32-54(S), TM2;92-114(P), TM3;140-162(S), TM4;197-219(S), TM5;238-260(S), TM6;272-293(P)]

[0517] olfactory receptor OR93Gib [Hylobates lar] (AF045580); 160/309 (51%)

[0518] Seq. ID. No. 466 [TM1;1-23(S), TM2;33-55(S), TM3;69-91(P), TM4;150-171(P), TM5;182-204(P), TM6;211-233(S)]

[0519] HsOLF1 [Homo sapiens] (U56420);147/247 (59%)

[0520] Seq. ID. No. 468 [TM1;26-48(P), TM2;94-116(P), TM3;136-158(P), TM4;180-202(S), TM5;209-231(P), TM6;238-260(S), TM7;271-292(P)]

[0521] olfactory receptor 4 [Gallus gallus ] (X94744);170/307 (55%)

[0522] Seq. ID. No. 470 [TM1;7-29(P), TM2;35-57(S), TM3;70-92(S), TM4;184-205(P), TM5;213-235(S), TM6;247-268(P)]

[0523] olfactory receptor OR93Gib [Hylobates lar] (AF045580);151/283 (53%)

[0524] Seq. ID. No. 472 [TM1;19-41(P), TM2;56-78(S), TM3;104-126(P), TM4;144-166(P), TM5;203-224(P), TM6;237-259(P), TM7;269-291(P)]

[0525] odorant receptor MOR83 [Mus musculus ] (AB030894);160/306 (52%)

[0526] Seq. ID. No.474 [TM1;27-49(P),TM2;142-164(S), TM3;172-193(S), TM4;205-226(P), TM5;242-264(P), TM6;268-290(S)]

[0527] odorant receptor MOR83 [Mus musculus ] (AB030894);170/308 (55%)

[0528] Seq. ID. No.476 [TM1;37-59(P), TM2;108-130(S), TM3;153-175(P), TM4;188-210(P), TM5;214-235(P), TM6;251-273(P), TM7;278-300(S)]

[0529] odorant receptor MOR83 [Mus musculus ] (AB030894);168/297 (56%)

[0530] Seq. ID. No. 478 [TM1;29-51(P), TM2;58-80(S), TM3;141-163(P), TM4;177-199(P), TM5;205-226(P), TM6;239-261(P), TM7;271-293(S)]

[0531] odorant receptor MOR83 [Mus musculus ] (AB030894);159/300 (53%)

[0532] Seq. ID. No.480 [TM1;30-52(P), TM2;95-117(S), TM3;149-171(S), TM4;197-219(P), TM5;241-263(P), TM6;268-290(P)]

[0533] similar to rat olfactory receptor OR18; similar to S29710 (PID:g423702) [Homo sapiens] (AC004908);167/312 (53%)

[0534] Seq. ID. No. 482 [TM1;23-45(P), TM2;58-80(S), TM3;96-118(S), TM4;141-163(S), TM5;200-222(P), TM6;245-267(S), TM7;270-292(S)]

[0535] CfOLF1 [Canis familiaris] (U53679);149/310 (48%)

[0536] Seq. ID. No. 484 [TM1;29-50(P), TM2;60-82(S), TM3;95-117(P), TM4;134-156(S), TM5;203-225(P), TM6;238-259(S), TM7;274-294(S)]

[0537] olfactory receptor P2 [Mus musculus ] (AF247657);144/307 (46%)

[0538] Seq. ID. No.486 [TM1;26-48(S), TM2;88-110(P), TM3;136-158(S), TM4;194-216(P), TM5;231-253(P), TM6;259-281(S)]

[0539] similar to rat olfactory receptor OR18; similar to S29710 (PID:g423702) [Homo sapiens] (AC004908);177/296 (59%)

[0540] Seq. ID. No. 488 [TM1;30-52(P), TM2;70-92(S), TM3;106-128(S), TM4;146-168(P), TM5;196-218(P), TM6;239-261(S), TM7;270-292(S)]

[0541] odorant receptor S46 [Mus musculus ] (AF121979);188/304 (61%)

[0542] Seq. ID. No. 490 [TM1;25-47(P), TM2;53-75(S), TM3;150-172(S), TM4;199-221(P), TM5;235-257(P), TM6;269-291(S)]

[0543] odorant receptor MOR18 [Mus musculus ] (AB030895);193/301 (64%)

[0544] Seq. ID. No. 492 [TM1;6-28(S), TM2;30-51(S), TM3;105-127(P), TM4;138-160(P), TM5;169-191(S), TM6;199-221(P), TM7;235-257(P), TM8;266-288(S)]

[0545] odorant receptor A16 [Mus musculus ] (AB030896);184/302 (60%)

[0546] Seq. ID. No. 494 [TM1;24-46(P), TM2;57-79(S), TM3;108-130(S), TM4;145-167(S), TM5;177-199(S), TM6;209-231(P), TM7;239-261(S), TM8;270-292(P)]

[0547] odorant receptor S1 [Mus musculus ] (AF121972);129/297 (43%)

[0548] Seq. ID. No. 496 [TM1;74-96(P),TM2;126-148(S),TM3;169-191(P), TM4;206-228(P), TM5;234-255(P), TM6;266-288(P), TM7;297-319(P)]

[0549] olfactory receptor P2 [Mus musculus ] (AF247657);130/305 (42%)

[0550] Seq. ID. No. 498 [TM1;48-70(P), TM2;73-95(S), TM3;99-121(S), TM4;130-151(S), TM5;162-184(P), TM6;222-244(P), TM7;254-275(P), TM8;284-306(S)]

[0551] chick olfactory receptor 7 [Gallus gallus ] (Z79586);130/303 (42%)

[0552] Seq. ID. No. 500 [TM1;8-30(P), TM2;34-56(P), TM3;82-104(S), TM4;140-162(P), TM5;202-224(P), TM6;240-261(P), TM7;269-291(S)]

[0553] odorant receptor S1 [Mus musculus ] (AF121972);143/307 (46%)

[0554] Seq. ID. No. 502 [TM1;1-23(S), TM2;42-64(S), TM3;84-106(P), TM4;148-169(P), TM5;184-205(S), TM6;213-235(S)]

[0555] olfactory receptor E6 [Mus musculus ] (AF102528);155/223 (69%)

[0556] Seq. ID. No. 504 [TM1;2-24(S), TM2;40-62(S), TM3;80-102(P), TM4;144-166(P), TM5;181-202(S), TM6;214-235(S)]

[0557] olfactory receptor [Rattus norvegicus] (X80671);127/243 (52%)

[0558] Seq. ID. No. 506 [TM1;1-23(P), TM2;27-49(P), TM3;65-87(S), TM4;89-111(P), TM5;156-178(P), TM6;194-215(P), TM7;227-249(S)]

[0559] olfactory receptor [Gorilla gorilla] (AF101764);93/214 (43%)

[0560] Seq. ID. No. 508 [TM1;11-33(P), TM2;49-71(S), TM3;80-102(S), TM4;128-150(S), TM5;193-215(P), TM6;225-247(P), TM7;254-276(S)]

[0561] olfactory receptor P2 [Mus musculus ] (AF247657);128/290 (44%)

[0562] Seq. ID. No. 510 [TM1;18-40(P), TM2;56-78(P), TM3;91-113(S), TM4;125-147(S), TM5;200-222(P), TM6;242-264(S), TM7;269-291(S)]

[0563] olfactory receptor-like protein [Rattus norvegicus] (AF029357);129/300 (43%)

[0564] Seq. ID. No. 512 [TM1;25-47(P), TM2;55-77(S), TM3;93-115(P), TM4;124-146(S), TM5;206-228(P), TM6;237-259(P), TM7;270-291(S)]

[0565] olfactory receptor [Gorilla gorilla] (AF101764);125/302 (41%)

[0566] Seq. ID. No. 514 [TM1;8-30(S), TM2;32-51(P), TM3;63-85(S), TM4;94-116(S), TM5;141-163(P), TM6;201-223(P), TM7;244-266(S), TM8;272-293(S)]

[0567] olfactory receptor-like protein [Rattus norvegicus] (AF029357);131/297 (44%)

[0568] Seq. ID. No. 516 [TM1;26-48(P), TM2;53-75(S), TM3;96-118(S), TM4;135-157(P), TM5;198-220(P), TM6;241-263(S), TM7;270-291(S)]

[0569] gustatory receptor 43 [Rattus norvegicus] (AB038167);265/311 (85%)

[0570] Seq. ID. No. 518 [TM1;31-52(P), TM2;62-84(S), TM3;99-121(P), TM4;144-166(S), TM5;202-224(P), TM6;236-258(P), TM7;271-292(S)]

[0571] dJ80119.7 (olfactory receptor-like protein (hs6M1-3)) [Homo sapiens] (AL022727);174/304 (57%)

[0572] Seq. ID. No. 520 [TM1;8-30(P), TM2;79-101(P), TM3;128-150(S), TM4;186-208(P), TM5;226-247(S), TM6;257-277(S)]

[0573] gustatory receptor 43 [Rattus norvegicus] (AB038167);169/283 (59%)

[0574] Seq. ID. No. 522 [TM1;32-54(P), TM2;56-78(S), TM3;91-113(S), TM4;142-164(S), TM5;205-227(P), TM6;238-260(S), TM7;272-294(S)]

[0575] olfactory protein [Rattus norvegicus] (M64377);161/303 (53%)

[0576] Seq. ID. No. 524 [TM1;1-22(S), TM2;29-51(S), TM3;101-123(P), TM4;172-194(P), TM5;213-235(S), TM6;239-261(S)]

[0577] olfactory protein [Rattus norvegicus] (M64392);165/268 (61%)

[0578] Seq. ID. No. 526 [TM1;28-50(P), TM2;61-83(S), TM3;103-125(P), TM4;140-162(P), TM5;202-224(P), TM6;237-259(P)]

[0579] olfactory protein [Rattus norvegicus] (M64377);161/305 (52%)

[0580] Seq. ID. No. 528 [TM1;27-49(P), TM2;63-85(S), TM3;91-113(S), TM4;141-163(S), TM5;177-199(S), TM6;206-228(P), TM7;240-262(S), TM8;270-292(S)]

[0581] olfactory receptor [Pan troglodytes] (AF101741);195/307 (63%)

[0582] Seq. ID. No. 530 [TM1;2-24(S), TM2;31-53(S), TM3;65-87(S), TM4;109-131(S), TM5;169-191(P), TM6;209-226(S)]

[0583] olfactory receptor [Mus musculus ] (AJ251154);190/285 (66%)

[0584] Seq. ID. No.532 [TM1;33-55(P), TM2;98-120(S), TM3;132-154(S), TM4;175-197(S), TM5;205-227(P), TM6;237-258(P), TM7;278-299(S)]

[0585] olfactory factor OR37-rat(S29711); 244/304 (80%)

[0586] Seq. ID. No. 534 [TM1;2-24(S), TM2;31-53(S), TM3;65-87(S), TM4;109-131(S), TM5;171-193(P), TM6;208-226(P)]

[0587] olfactory receptor [Mus musculus ] (AJ251154);197/285 (69%)

[0588] Seq. ID. No. 536 [TM1;1-23(S), TM2;57-79(P), TM3;128-150(S), TM4;169-191(S), TM5;206-228(P), TM6;237-259(P), TM7;267-288(P), TM8;305-327(S)]

[0589] olfactory factor OR37—rat(S29711);259/304 (85%)

[0590] Seq. ID. No. 538 [TM1;8-30(P), TM2;56-78(S), TM3;81-103(S), TM4;107-129(S), TM5;148-170(P), TM6;177-199(P), TM7;203-225(P)]

[0591] olfactory receptor [Mus musculus ] (AJ251154);166/283 (58%)

[0592] Seq. ID. No. 540 [TM1;24-46(P), TM2;62-84(S), TM3;101-123(S), TM4;137-159(S), TM5;171-193(S), TM6;207-229(P), TM7;237-258(P), TM8;274-296(S)]

[0593] olfactory receptor [Mus musculus ] (AJ251154);219/319 (68%)

[0594] Seq. ID. No. 542 [TM1;43-65(P),TM2;117-139(S),TM3;152-174(P), TM4;214-236(P), TM5;253-274(S), TM6;286-306(S)]

[0595] olfactory protein [Rattus norvegicus] (M64377);174/311 (55%)

[0596] Seq. ID. No. 544 [TM1;39-61(P),TM2;116-138(P),TM3;152-174(P), TM4;214-236(P), TM5;253-274(P), TM6;284-306(S)]

[0597] olfactory receptor [Homo sapiens] (AJ003147);171/308 (55%)

[0598] Seq. ID. No. 546 [TM1;33-55(P), TM2;68-90(P), TM3;100-122(S), TM4;143-165(S), TM5;208-230(P), TM6;244-266(S), TM7;279-298(S)]

[0599] HGMP07J [Homo sapiens]>gi|228481|prf∥1804351C olfactory receptor HGMP07J [Homo sapiens] (X64995);143/297 (48%)

[0600] Seq. ID. No. 548 [TM1;17-39(P), TM2;70-92(S), TM3;98-120(P), TM4;145-167(P), TM5;202-224(P), TM6;238-259(S)]

[0601] olfactory receptor OR93Gib [Hylobates lar] (AF045580); 149/309 (48%)

[0602] Seq. ID. No. 550 [TM1;1-19(S), TM2;27-49(P), TM3;103-125(S), TM4;139-161(P), TM5;201-223(P), TM6;237-258(S)]

[0603] olfactory factor OR37-rat(S29711);148/305 (48%)

[0604] Seq. ID. No. 552 [TM1;33-54(P), TM2;60-82(P), TM3;95-117(P), TM4;133-155(S), TM5;202-224(P), TM6;239-261(P), TM7;273-294(S)]

[0605] olfactory receptor E3 [Mus musculus ] (AF102527);159/223 (71%)

[0606] Seq. ID. No. 554 [TM1;19-41(S), TM2;49-71(P), TM3;81-103(S), TM4;121-143(P), TM5;163-185(S), TM6;216-238(P), TM7;260-282(S), TM8;294-314(S)]

[0607] olfactory receptor E3 [Mus musculus ] (AF102527);168/223 (75%)

[0608] Seq. ID. No. 556 [TM1;33-55(P), TM2;65-87(P), TM3;101-123(S), TM4;149-171(P), TM5;208-230(P), TM6;242-264(P), TM7;277-298(S), TM8;320-342(P)]

[0609] olfactory receptor E3 [Mus musculus ] (AF102527);128/223 (57%)

[0610] Seq. ID. No. 558 [TM1;4-26(S), TM2;34-56(S), TM3;62-84(S), TM4;165-187(P), TM5;204-226(P), TM6;235-257(S)]

[0611] olfactory receptor E3 [Mus musculus ] (AF102527);147/223 (65%)

[0612] Seq. ID. No. 560 [TM1;25-47(P), TM2;57-79(S), TM3;93-115(P), TM4;134-156(S), TM5;201-223(S), TM6;234-256(S), TM7;269-291(S)]

[0613] olfactory receptor [Gorilla gorilla] (AF101764);128/301 (42%)

[0614] Seq. ID. No.562 [TM1;34-55(P),TM2;101-123(S),TM3;144-166(S), TM4;208-230(P), TM5;244-266(P), TM6;275-297(S)]

[0615] olfactory receptor E3 [Mus musculus ] (AF102527);152/223 (68%)

[0616] Seq. ID. No. 564 [TM1;35-57(P), TM2;95-117(S), TM3;142-164(P), TM4;170-192(S), TM5;207-229(P), TM6;238-260(P)]

[0617] olfactory receptor [Mus musculus ] (AJ251155);256/312 (82%)

[0618] Seq. ID. No. 566 [TM1;19-41(P), TM2;61-83(P), TM3;95-117(S), TM4;141-163(S), TM5;201-223(P), TM6;239-260(S)]

[0619] HGMP07J [Homo sapiens]>gi|228481∥prf∥1804351C olfactory receptor HGMP07J [Homo sapiens] (X64995);157/309 (50%)

[0620] Seq. ID. No. 568 [TM1;24-46(P), TM2;57-79(S), TM3;92-114(S), TM4;141-163(P), TM5;202-224(P), TM6;239-261(S), TM7;268-290(S)]

[0621] olfactory protein [Rattus norvegicus] (M64378);208/304 (68%)

[0622] Seq. ID. No. 570 [TM1;63-85(P), TM2;98-120(S), TM3;145-167(S), TM4;179-201(S), TM5;243-265(P), TM6;281-302(S)]

[0623] olfactory receptor [Mus musculus ] (M84005);191/305 (62%)

[0624] Seq. ID. No. 572 [TM1;13-35(S), TM2;59-81(S), TM3;102-124(S), TM4;166-188(P), TM5;201-223(S), TM6;237-257(S)]

[0625] OL1 receptor [Rattus norvegicus] (L34074);120/270 (44%)

[0626] Seq. ID. No. 574 [TM1;15-37(S), TM2;52-74(S), TM3;99-121(S), TM4;162-184(P), TM5;195-216(S), TM6;227-249(S), TM7;252-274(P), TM8;277-299(P)]

[0627] olfactory receptor G7 [Mus musculus ] (AF102537);133/223 (59%)

[0628] Seq. ID. No. 576 [TM1;19-41(P), TM2;57-79(S), TM3;94-116(S), TM4;139-161(S), TM5;202-224(P), TM6;240-260(S), TM7;276-298(S)]

[0629] olfactory receptor P2 [Mus musculus ] (AF247657);135/301 (44%)

[0630] Seq. ID. No. 578 [TM1;28-50(P), TM2;62-84(S), TM3;98-120(P), TM4;144-166(P), TM5;209-231(S), TM6;242-264(P)]

[0631] olfactory protein [Rattus norvegicus] (M64377);175/309 (56%)

[0632] Seq. ID. No. 580 [TM1;1-23(S), TM2;51-73(P), TM3;119-141(S), TM4;166-187(S), TM5;204-226(S), TM6;235-257(P), TM7;272-294(S)]

[0633] CfOLF2 [Canis familiaris] (U53680);168/293 (57%)

[0634] Seq. ID. No.582 [TM1;32-54(P), TM2;94-116(S), TM3;145-167(P), TM4;200-222(P), TM5;246-268(S), TM6;270-292(S)]

[0635] olfactory receptor [Pan troglodytes] (AF101741);184/307 (59%)

[0636] Seq. ID. No. 584 [TM1;55-77(P), TM2;91-113(S), TM3;124-146(P), TM4;172-194(S), TM5;209-231(P), TM6;238-260(P), TM7;265-287(P), TM8;298-320(S)]

[0637] olfactory receptor [Mus musculus ] (AJ251155);179/306 (58%)

[0638] Seq. ID. No.586 [TM1;27-49(P), TM2;87-109(P), TM3;126-148(S), TM4;153-175(S), TM5;202-224(P), TM6;239-260(S), TM7;272-294(S)]

[0639] olfactory receptor [Rattus norvegicus] (X80671);151/300 (50%)

[0640] Seq. ID. No. 588 [TM1;28-50(P), TM2;98-120(P), TM3;140-162(P), TM4;206-227(P), TM5;240-262(S), TM6;271-293(S)]

[0641] olfactory receptor OR93Ch [Pan troglodytes] (AF045577);161/304 (52%)

[0642] Seq. ID. No. 590 [TM1;11-33(S), TM2;52-73(S), TM3;98-120(P), TM4;135-157(S), TM5;163-184(P), TM6;225-247(S)]

[0643] HGMP07J [Homo sapiens]>gi|228481|prf∥1804351C olfactory receptor HGMP07J [Homo sapiens] (X64995);119/261 (45%)

[0644] Seq. ID. No. 592 [TM1;1-23(P), TM2;42-64(S), TM3;76-98(S), TM4;107-129(P), TM5;137-158(S), TM6;176-198(S)]

[0645] olfactory receptor [Mus musculus ] (AJ251154);188/216 (87%)

[0646] Seq. ID. No. 594 [TM1;11-33(P), TM2;47-69(S), TM3;94-116(P), TM4;140-162(P), TM5;168-189(S), TM6;195-208(S)]

[0647] similar to mouse olfactory receptor 13; similar to P34984 (PID:g464305) [Homo sapiens] (AC005587);126/208 (60%)

[0648] Seq. ID. No. 596 [TM1;17-39(P), TM2;84-106(P), TM3;126-147(S), TM4;149-171(S), TM5;201-223(S), TM6;258-280(P), TM7;298-320(S), TM8;330-352(S)]

[0649] olfactory receptor [Mus musculus ] (M84005);182/305 (59%)

[0650] Seq. ID. No. 598 [TM1;16-38(P), TM2;94-116(S), TM3;140-162(P), TM4;171-193(S), TM5;200-222(P), TM6;239-261(S)]

[0651] similar to mouse olfactory receptor 13; similar to P34984 (PID:g464305) [Homo sapiens] (AC005587);183/251 (72%)

[0652] Seq. ID. No. 600 [TM1;32-54(P), TM2;95-117(P), TM3;139-161(S), TM4;196-218(P), TM5;242-264(S), TM6;276-298(S)]

[0653] HsOLF3 [Homo sapiens] (U56421);135/305 (44%)

[0654] Seq. ID. No. 602 [TM1;19-41(P), TM2;61-83(P), TM3;94-116(S), TM4;148-170(P), TM5;180-202(S), TM6;211-233(P), TM7;241-262(S), TM8;273-294(S)]

[0655] R30385_{—}1 [Homo sapiens] (AC004510);293/313 (93%)

[0656] Seq. ID. No.604 [TM1;73-95(S), TM2;146-168(S), TM3;191-213(S), TM4;245-267(P), TM5;291-312(P), TM6;324-344(S)]

[0657] olfactory receptor 4 [Gallus gallus ] (X94744);169/310 (54%)

[0658] Seq. ID. No. 606 [TM1;1-21(S), TM2;45-67(P), TM3;73-95(S), TM4;106-128(S), TM5;161-183(P), TM6;223-245(P), TM7;258-280(S), TM8;290-311(S)]

[0659] odorant receptor S1 [Mus musculus ] (AF121972);215/315 (68%)

[0660] Seq. ID. No. 608 [TM1;41-63(P), TM2;71-93(S), TM3;105-127(P), TM4;149-171(P), TM5;216-238(P), TM6;249-271(P), TM7;279-301(S)]

[0661] odorant receptor S1 [Mus musculus ] (AF121972);278/317 (87%)

[0662] Seq. ID. No. 610 [TM1;29-50(P), TM2;59-81(P), TM3;96-118(S), TM4;144-166(P), TM5;203-224(P), TM6;240-262(P), TM7;269-291(S)]

[0663] odorant receptor MOR83 [Mus musculus ] (AB030894);167/308 (54%)

[0664] Seq. ID. No.612 [TM1;56-78(S), TM2;97-119(S), TM3;136-158(P), TM4;184-206(P), TM5;239-261(P), TM6;278-299(S), TM7;310-331(S)]

[0665] odorant receptor S1 [Mus musculus ] (AF121972);195/293 (66%)

[0666] Seq. ID. No. 614 [TM1;26-48(P), TM2;60-82(S), TM3;93-115(S), TM4;141-163(P), TM5;206-228(P), TM6;238-259(S), TM7;268-290(S)]

[0667] olfactory receptor C6 [Mus musculus] (AF102523);148/299 (49%)

[0668] Seq. ID. No. 616 [TM1;19-41(S), TM2;62-84(S), TM3;100-122(S), TM4;140-162(P), TM5;202-224(P), TM6;242-264(S)]

[0669] BC62940_{—}2 [Homo sapiens] (AC004659);214/310 (69%)

[0670] Seq. ID. No. 618 [TM1;33-55(P), TM2;64-86(S), TM3;100-122(S), TM4;137-159(P), TM5;207-229(P), TM6;245-267(P), TM7;273-295(S)]

[0671] taste bud receptor protein TB 641 [Rattus norvegicus] (U50949);270/310 (87%)

[0672] Seq. ID. No. 620 [TM1;3-25(P), TM2;30-51(S), TM3;53-74(S), TM4;81-95(S),TM5;101-122(S),TM6;144-166(P),TM7;183-205(P), TM8;214-235(S)]

[0673] olfactory receptor [Callithrix jacchus] (AF127882);200/216 (92%)

[0674] Seq. ID. No. 622 [TM1;3-25(P), TM2;30-51(P), TM3;54-75(S), TM4;78-96(S),TM5;102-123(S),TM6;144-166(P),TM7;183-205(P), TM8;214-235(S)]

[0675] olfactory receptor [Eulemur rubriventer] (AF127861);200/216 (92%)

[0676] Seq. ID. No. 624 [TM1;16-38(P), TM2;94-116(S), TM3;140-162(P), TM4;171-193(S), TM5;200-222(P), TM6;239-260(P)]

[0677] similar to mouse olfactory receptor 13; similar to P34984 (PID:g464305) [Homo sapiens] (AC005587);217/307 (70%)

[0678] Seq. ID. No. 626 [TM1;1-23(P), TM2;52-74(P), TM3;120-142(S), TM4;168-190(P), TM5;230-251(P), TM6;262-284(P)]

[0679] odorant receptor MOR18 [Mus musculus ] (AB030895);158/299 (52%)

[0680] Seq. ID. No. 628 [TM1;27-49(P), TM2;62-84(S), TM3;98-120(S), TM4;145-167(P), TM5;205-226(P), TM6;237-259(P)]

[0681] odorant receptor MOR18 [Mus musculus ] (AB030895);149/293 (50%)

[0682] Seq. ID. No. 630 [TM1;39-61(P), TM2;80-102(S), TM3;115-137(P), TM4;160-182(P), TM5;190-212(S), TM6;225-246(P), TM7;261-283(P), TM8;288-310(P)]

[0683] similar to rat olfactory receptor OR18; similar to S29710 (PID:g423702) [Homo sapiens] (AC004908);164/302 (54%)

[0684] Seq. ID. No. 632 [TM1;31-53(P), TM2;62-84(S), TM3;101-123(S), TM4;133-155(S), TM5;164-186(S), TM6;200-222(P), TM7;238-260(P), TM8;268-290(S)]

[0685] odorant receptor MOR83 [Mus musculus ] (AB030894);164/307 (53%)

[0686] Seq. ID. No. 634 [TM1;27-49(P), TM2;92-114(P), TM3;133-155(P), TM4;200-222(P), TM5;237-258(S), TM6;266-288(S)]

[0687] odorant receptor MOR83 [Mus musculus ] (AB030894);262/306 (85%)

[0688] Seq. ID. No. 636 [TM1;5-27(P), TM2;33-55(S), TM3;59-81(S), TM4;83-105(S), TM5;114-136(S), TM6;144-166(P), TM7;180-201(S), TM8;214-236(S)]

[0689] taste bud receptor protein TB 641 [Rattus norvegicus] (U50949);189/244 (77%)

[0690] Seq. ID. No. 638 [TM1;7-29(S), TM2;67-89(S), TM3;102-124(P), TM4;166-188(S), TM5;209-231(P), TM6;237-259(S)]

[0691] BC319430_{—}5 [Homo sapiens] (AC006271);183/260 (70%)

[0692] Seq. ID. No. 640 [TM1;20-42(S), TM2;46-67(S), TM3;72-94(S), TM4;115-137(S), TM5;160-182(P), TM6;218-240(P), TM7;256-278(S), TM8;292-314(S)]

[0693] odorant receptor S1 [Mus musculus ] (AF121972);191/314 (60%)

[0694] Seq. ID. No. 642 [TM1; 2-24(S), TM2;48-70(P), TM3;116-138(S), TM4;162-184(P), TM5;188-210(S), TM6;222-244(S), TM7;263-285(S), TM8;325-345(P)]

[0695] OLF4 [Homo sapiens] (AC002988);200/302 (66%)

[0696] Seq. ID. No. 644 [TM1;25-47(P), TM2;58-80(S), TM3;100-122(P), TM4;142-164(P), TM5;193-215(P), TM6;241-262(S), TM7;272-293(S)]

[0697] BC85395_{—}3 [Homo sapiens] (AC005255);201/302 (66%)

[0698] Seq. ID. No. 646 [TM1;19-41(S), TM2;95-117(P), TM3;143-165(P), TM4;170-192(S), TM5;200-222(S), TM6;241-263(S)]

[0699] BC85395_{—}3 [Homo sapiens] (AC005255);186/298 (62%)

[0700] Seq. ID. No. 648 [TM1;27-49(P), TM2;60-82(S), TM3;100-122(P), TM4;143-165(P), TM5;210-232(P), TM6;243-265(S)]

[0701] olfactory receptor [Papio hamadryas] (AF127819);204/216 (94%)

[0702] Seq. ID. No. 650 [TM1;34-56(P), TM2;62-84(S), TM3;98-120(P), TM4;124-146(S), TM5;202-224(P), TM6;237-259(S), TM7;270-292(S)]

[0703] olfactory protein [Rattus norvegicus] (M64386);177/308 (57%)

[0704] Seq. ID. No. 652 [TM1;41-63(S), TM2;82-104(S), TM3;113-134(S), TM4;144-166(P), TM5;181-203(P), TM6;210-232(S)]

[0705] HGMP07J [Homo sapiens]>gi|2284811prf∥1804351C olfactory receptor HGMP07J [Homo sapiens] (X64995);124/248 (50%)

[0706] Seq. ID. No. 654 [TM1;12-34(P), TM2;45-67(S), TM3;101-123(S), TM4;144-166(S), TM5;197-219(P), TM6;240-261(S), TM7;272-293(S)]

[0707] HGMP07J [Homo sapiens]>gi|228481|prf∥1804351C olfactory receptor HGMP07J [Homo sapiens] (X64995);165/308 (53%)

[0708] Seq. ID. No. 656 [TM1;28-50(P), TM2;94-116(S),TM3;139-161(S), TM4;203-225(P), TM5;239-260(P), TM6;271-293(S)]

[0709] olfactory receptor P2 [Mus musculus ] (AF247657);155/308 (50%)

[0710] Seq. ID. No. 658 [TM1;51-73(P), TM2;83-105(P), TM3;156-178(P), TM4;202-224(P), TM5;229-250(P), TM6;265-287(P), TM7;292-314(P)]

[0711] odorant receptor MOR83 [Mus musculus ] (AB030894);174/304 (57%)

[0712] Seq. ID. No. 660 [TM1;1-23(S), TM2;50-72(P), TM3;81-103(S), TM4;113-135(P), TM5;160-182(S), TM6;222-244(P), TM7;258-280(S), TM8;292-314(S)]

[0713] olfactory receptor [Gorilla gorilla] (AF101764);135/306 (44%)

[0714] Seq. ID. No. 662 [TM1;23-45(P), TM2;60-82(S), TM3;98-120(S), TM4;139-161(P), TM5;203-225(P), TM6;237-259(S), TM7;271-292(S)]

[0715] olfactory receptor, family 12, subfamily D, member 2(NP_{—}039224);205/306 (66%)

[0716] Seq. ID. No. 664 [TM1;7-29(S), TM2;33-55(S), TM3;95-117(P), TM4;141-163(S), TM5;204-226(P), TM6;240-262(P), TM7;272-293(S)]

[0717] olfactory receptor [Mus musculus ] (AJ251155);157/309 (50%)

[0718] Seq. ID. No. 666 [TM1;18-40(P), TM2;55-77(S), TM3;111-133(P), TM4;142-164(P), TM5;195-217(P), TM6;246-268(P), TM7;284-305(S)]

[0719] candidate taste receptor T2R7(AF227133);95/303 (31%)

[0720] Seq. ID. No. 668 [TM1;8-30(P), TM2;45-67(S), TM3;97-119(S), TM4;128-150(P), TM5;180-202(P), TM6;228-250(P), TM7;252-273(S), TM8;276-298(S)]

[0721] candidate taste receptor T2R13(AF227137);140/307 (45%)

[0722] Seq. ID. No. 670 [TM1;7-29(P), TM2;48-70(S), TM3;99-120(S), TM4;129-151(P), TM5;178-200(P), TM6;227-249(P)]

[0723] candidate taste receptor T2R13(AF227137);136/306 (44%)

[0724] Seq. ID. No. 672 [TM1;10-32(P), TM2;42-64(P), TM3;93-115(S), TM4;126-148(P), TM5;182-204(P), TM6;235-257(P)]

[0725] candidate taste receptor T2R7(AF227133);131/311 (42%)

[0726] Seq. ID. No. 674 [TM1;19-41(S), TM2;61-83(S), TM3;108-130(S), TM4;138-160(P), TM5;195-217(P), TM6;247-269(P)]

[0727] candidate taste receptor T2R9(AF227135);101/307 (32%)

[0728] Seq. ID. No. 676 [TM1;34-56(P), TM2;75-97(S), TM3;114-136(P), TM4;158-180(P), TM5;209-231(P), TM6;262-284(P), TM7;286-308(S)]

[0729] taste receptor rT2R6(AF240766);100/291 (34%)

[0730] Seq. ID. No. 678 [TM1;34-56(P), TM2;75-97(S), TM3;114-136(P), TM4;158-180(P), TM5;209-231(P), TM6;258-280(P)]

[0731] candidate taste receptor T2R7(AF227133);103/310 (33%)

[0732] Seq. ID. No. 680 [TM1;7-29(P), TM2;94-116(P), TM3;131-153(P), TM4;182-204(P), TM5;235-257(P), TM6;267-289(P), TM7;291-307(S)]

[0733] taste receptor rT2R12(AF240768);214/307 (69%)

[0734] Seq. ID. No. 682 [TM1;8-30(P), TM2;46-68(P), TM3;91-113(S), TM4;128-150(P), TM5;180-202(P), TM6;229-251(P)]

[0735] candidate taste receptor T2R13(AF227137);140/309 (45%)

[0736] Seq. ID. No. 684 [TM1;8-30(P), TM2;45-67(P), TM3;90-112(P), TM4;129-151(P), TM5;178-200(P), TM6;227-249(P)]

[0737] candidate taste receptor T2R13(AF227137);116/246 (47%)

[0738] Seq. ID. No. 686 [TM1;7-29(P), TM2;34-56(P), TM3;61-83(P), TM4;116-138(P), TM5;147-169(P), TM6;197-219(P), TM7;248-269(P), TM8;295-317(S)]

[0739] candidate taste receptor T2R13(AF227137);131/292 (44%)

[0740] Seq. ID. No. 688 [TM1;8-30(P), TM2;45-67(P), TM3;97-119(P), TM4;126-148(P), TM5;178-200(P), TM6;230-251(P), TM7;267-289(S)]

[0741] candidate taste receptor T2R13(AF227137);136/309 (44%)

[0742] Seq. ID. No. 690 [TM1;8-30(P), TM2;45-67(P), TM3;97-119(P), TM4;128-150(P), TM5;180-202(P), TM6;229-251(P)]

[0743] candidate taste receptor T2R13(AF227137);115/252 (45%)

[0744] Seq. ID. No. 692 [TM1;8-30(P), TM2;46-68(S), TM3;99-121(S), TM4;128-150(P), TM5;184-206(P), TM6;229-251(P)]

[0745] candidate taste receptor T2R13(AF227137);136/306 (44%)

[0746] Seq. ID. No. 694 [TM1;8-30(P), TM2;45-67(P), TM3;97-119(S), TM4;128-150(P), TM5;178-200(P), TM6;228-250(P), TM7;276-298(S)]

[0747] candidate taste receptor T2R13(AF227137);131/293 (44%)

### INDUSTRIAL APPLICABILITY

[0748] The present invention makes it possible to search for novel GPCR genes or GPCR proteins which could discover a biocommunication system or identify a novel target protein for medicine cyclopaedically on a database. Further, by using the obtained GPCR proteins, it becomes possible to screen the endogenous ligands and the like. Said GPCR and their endogenous ligands are expected to be applicable to the research of medicines acting on them, and to the novel therapies, such as the application to gene therapies using said gene and its mutant. In addition, as the ligands of taste receptors and odorant receptors, they are expected to be applicable to develop a novel taste material, a bitter taste inhibitor, a novel odorant material, an odorant inhibitor and the like. Moreover, analysis of novel GPCR genes is expected to lead to discover the new biocommunication system as well as to identify novel target proteins for medicine.

1. A searching method of a G protein-coupled receptor gene and/or a G protein-coupled receptor protein characterized in extracting an open reading frame comprising 200 to 1500 amino acid residues and having 6 to 8 transmembrane segments from the genome data derived from a human, and in searching for a gene homologous to a known G protein-coupled receptor gene from the obtained open reading frame.

2. The searching method of a G protein-coupled receptor gene and/or a G protein-coupled receptor protein according to claim 1, wherein an open reading frame derived from a repeated sequence of DNA, an open reading frame with substantial undetermined amino acids, and an open reading frame in which any single amino acid residue comprising more than 20% of the whole sequence are eliminated, when extracting the open reading frame.

3. The searching method of a G protein-coupled receptor gene and/or a G protein-coupled receptor protein according to claim 1 or 2, wherein a gene homologous to a known G protein-coupled receptor gene is a G protein-coupled receptor gene or a G protein-coupled receptor associated gene.

4. The searching method of a G protein-coupled receptor gene and/or a G protein-coupled receptor protein according to any one of claims 1 to 3, wherein a G protein-coupled receptor contains an endogenous ligand.

5. The searching method of a G protein-coupled receptor gene and/or a G protein-coupled receptor protein according to claim 4, wherein a G protein-coupled receptor containing an endogenous ligand is a G protein-coupled receptor other than an odorant receptor or a taste receptor.

6. The searching method of a G protein-coupled receptor gene and/or a G protein-coupled receptor protein according to claim 4, wherein a G protein-coupled receptor containing an endogenous ligand is a G protein-coupled receptor of an odorant receptor.

7. The searching method of a G protein-coupled receptor gene and/or a G protein-coupled receptor protein according to claim 4, wherein a G protein-coupled receptor containing an endogenous ligand is a G protein-coupled receptor of a taste receptor.

8. A G protein-coupled receptor gene obtainable by the searching method of a G protein-coupled receptor gene and/or a G protein-coupled receptor protein according to any one of claims 1 to 7.

9. A gene which encodes a G protein-coupled receptor protein (a) or (b) described below;
(a) a G protein-coupled receptor protein comprising an amino acid sequence represented by Seq. ID No.2n (n=any one of integral numbers 1 to 51),
(b) a G protein-coupled receptor protein comprising an amino acid sequence where one or a few amino acids are deficient, substituted or added in an amino acid sequence represented by Seq. ID No.2n (n=any one of integral numbers 1 to 51).

10. DNA which encodes a G protein-coupled receptor protein comprising DNA which contains a base sequence represented by Seq. ID No. 2n-1 (n=any one of integral numbers 1 to 51) or its complementary sequence and a part or the whole of these sequences.

11. DNA which hybridizes with DNA comprising the gene according to claim 10 under a stringent condition, and encodes a G protein-coupled receptor protein.

12. A gene which encodes a G protein-coupled receptor protein (a) or (b) described below;
(a) a G protein-coupled receptor protein comprising an amino acid sequence represented by Seq. ID No. 2n (n=any one of integral numbers 52 to 332),
(b) a G protein-coupled receptor protein comprising an amino acid sequence where one or a few amino acids are deficient, substituted or added in an amino acid sequence represented by Seq. ID No. 2n (n=any one of integral numbers 52 to 332).

13. DNA which encodes a G protein-coupled receptor protein comprising DNA which contains a base sequence represented by Seq. ID No. 2n-1 (n=any one of integral numbers 52 to 332) or its complementary sequence and a part or the whole of these sequences.

14. DNA which hybridizes with DNA comprising the gene according to claim 13 under a stringent condition, and encodes a G protein-coupled receptor protein.

15. A gene which encodes a G protein-coupled receptor protein (a) or (b) described below;
(a) a G protein-coupled receptor protein comprising an amino acid sequence represented by Seq. ID No. 2n (n=any one of integral numbers 333 to 347),
(b) a G protein-coupled receptor protein comprising an amino acid sequence where one or a few amino acids are deficient, substituted or added in an amino acid sequence represented by Seq. ID No. 2n (n=any one of integral numbers 333 to 347).

16. DNA which encodes a G protein-coupled receptor protein comprising DNA which contains a base sequence represented by Seq. ID No. 2n-1 (n=any one of integral numbers 333 to 347) or its complementary sequence and a part or the whole of these sequences.

17. DNA which hybridizes with DNA comprising the gene according to claim 16 under a stringent condition, and encodes a G protein-coupled receptor protein.

18. A G protein-coupled receptor protein obtainable by the searching method of a G protein-coupled receptor gene and/or a G protein-coupled receptor protein according to any one of claims 1 to 7.

19. A G protein-coupled receptor protein comprising an amino acid sequence represented by Seq. ID No. 2n (n=any one of integral numbers 1 to 51).

20. A G protein-coupled receptor protein comprising an amino acid sequence where one or a few amino acids are deficient, substituted or added in an amino acid sequence represented by Seq. ID No. 2n (n=any one of integral numbers 1 to 51).

21. A G protein-coupled receptor protein comprising an amino acid sequence represented by Seq. ID No. 2n (n=any one of integral numbers 52 to 332).

22. A G protein-coupled receptor protein comprising an amino acid sequence where one or a few amino acids are deficient, substituted or added in an amino acid sequence represented by Seq. ID No. 2n (n=any one of integral numbers 52 to 332).

23. A G protein-coupled receptor protein comprising an amino acid sequence represented by Seq. ID No. 2n (n=any one of integral numbers 333 to 347).

24. A G protein-coupled receptor protein comprising an amino acid sequence where one or a few amino acids are deficient, substituted or added in an amino acid sequence represented by Seq. ID No. 2n (n=any one of integral numbers 333 to 347).

25. A partial peptide of a G protein-coupled receptor protein obtainable by the searching method of a G protein-coupled receptor gene and/or a G protein-coupled receptor protein according to any one of claims 1 to 7.

26. The partial peptide according to claim 25, wherein the G protein-coupled receptor protein is the G protein-coupled receptor protein according to any one of claims 19 to 22.

27. A fusion protein or a fusion peptide constructed by binding the G protein-coupled receptor protein according to claim 18 or the partial peptide of the G protein-coupled receptor protein according to claim 25 to a marker protein and/or a peptide tag.

28. The fusion protein according to claim 27, wherein the G protein-coupled receptor protein is the G protein-coupled receptor protein according to any one of claims 19 to 24.

29. An antibody which specifically binds to the G protein-coupled receptor protein according to claim 18.

30. The antibody according to claim 29, wherein the G protein-coupled receptor protein is the G protein-coupled receptor protein according to any one of claims 19 to 24.

31. A host cell containing an expression system which can express the G protein-coupled receptor protein according to claim 18.

32. The host cell according to claim 31, wherein the G protein-coupled receptor protein is the G protein-coupled receptor protein according to any one of claims 19 to 24.

33. A non-human animal wherein its function of a gene which encodes the G protein-coupled receptor protein according to claim 18 is deficient or said protein overexpresses on its chromosome.

34. The non-human animal according to claim 33, wherein the G protein-coupled receptor protein is the G protein-coupled receptor protein according to any one of claims 19 to 24.

35. The non-human animal according to claim 33 or 34, wherein the non-human animal is a mouse.

36. A screening method of a promoter or a suppressor of a G protein-coupled receptor function, or of a G protein-coupled receptor expression characterized in using the G protein-coupled receptor protein according to any one of claims 18 to 24, the partial peptide according to claim 25 or 26, or a cell membrane which expresses said protein or the partial peptide, and a test substance.

37. A screening method of a promoter or a suppressor of a G protein-coupled receptor function, or of a G protein-coupled receptor expression characterized in using the G protein-coupled receptor protein according to any one of claims 18 to 24, the partial peptide according to claim 25 or 26, or a cell membrane which expresses said protein or the partial peptide, a G protein or a partial peptide of a G protein, and a test substance.

38. A screening method of a promoter or a suppressor of a G protein-coupled receptor function, or of a G protein-coupled receptor expression characterized in using a cell expressing the G protein-coupled receptor protein according to any one of claims 18 to 24 or the partial peptide according to claim 25 or 26, and a test substance.

39. The screening method of a promoter or a suppressor of a G protein-coupled receptor function, or of a G protein-coupled receptor expression according to any one of claims 36 to 38, wherein a cell which expresses the G protein-coupled receptor protein according to any one of claims 18 to 24 or the partial peptide according to claim 25 or 26 is the host cell according to claim 31 or 32.

40. A screening method of a promoter or a suppressor of a G protein-coupled receptor function, or of a G protein-coupled receptor expression characterized in using the non-human animal according to any one of claims 33 to 35, and a test substance.

41. A promoter or a suppressor of a G protein-coupled receptor function, or of a G protein-coupled receptor expression obtainable by the screening method of a promoter or a suppressor of a G protein-coupled receptor function, or of a G protein-coupled receptor expression according to any one of claims 36 to 40.

42. The promoter or the suppressor of a G protein-coupled receptor function, or of a G protein-coupled receptor expression according to claim 41, wherein the promoter or the suppressor of a G protein-coupled receptor function, or of a G protein-coupled receptor expression is a ligand for a G protein-coupled receptor.

43. A medical constituent characterized in being used for a medical treatment for a patient who needs elevation of the function or enhancement of the expression of a G protein-coupled receptor, and containing the protein according to any one of claims 18 to 24, the partial peptide according to claim 25 or 26, or the promoter of a G protein-coupled receptor function or expression according to claim 41 or 42 as an active component.

44. A medical constituent characterized in being used for a medical treatment for a patient who needs suppression of the function or the expression of a G protein-coupled receptor, and containing the protein according to any one of claims 18 to 24, the partial peptide according to claim 25 or 26, or the suppressor of a G protein-coupled receptor function or expression according to claim 41 or 42 as an active component.

45. A diagnostic method for diseases relating to the function or the expression of a G protein-coupled receptor characterized in comparing a DNA sequence encoding a G protein-coupled receptor protein in a sample to a DNA sequence encoding the protein according to any one of claims 18 to 24.

46. A diagnostic probe for diseases relating to the function or the expression of a G protein-coupled receptor comprising the whole or a part of an anti sense strand of DNA or RNA encoding the protein according to any one of claims 18 to 24.

47. A diagnostic drug for diseases relating to the function or the expression of a G protein-coupled receptor characterized in containing the diagnostic probe according to claim 46 and/or the antibody according to claim 29 or 30.

The application's sequence listing, which the Patent Office published only in electronic form, follows.

SEQUENCE LISTING (694 sequences)

SEQ ID NO: 1 - DNA, 972 bp, Homo sapiens
  CDS (1)..(972)
atgtacaaggactgcatcgagtccactggagactattttcttctctgtgacgccgaggggccatggggcatcattctggagtccctggccatacttggcatcgtggtcacaattctgctactcttagcatttctcttcctcatgcgaaagatccaagactgcagccagtggaatgtcctccccacccagctcctcttcctcctgagtgtcctggggctcttcggactcgcttttgccttcatcatcgagctcaatcaacaaactgcccccgtacgctactttctctttggggttctctttgctctctgtttctcatgcctcttagctcatgcctccaatctagtgaagctggttcggggttgtgtctccttctcctggacgacaattctgtgcattgctattggttgcagtctgttgcaaatcattattgccactgagtatgtgactctcatcatgaccagaggtatgatgtttgtgaatatgacaccctgccagctcaatgtggactttgttgtactcctggtctatgtcctcttcctgatggccctcacattcttcgtctccaaagccaccttctgtggcccgtgtgagaactggaagcagcatggaaggctcatctttatcactgtgctcttctccatcatcatctgggtggtgtggatctccatgctcctgagaggcaacccgcagttccagcgacagccccagtgggacgacccggtcgtctgcattgctctggtcaccaacgcatgggttttcctgctgctgtacatcgtccctgagctctgcattctctacagatcgtgtagacaggagtgccctttacaaggcaatgcctgccccgtcacagcctaccaacacagcttccaagtggagaaccaggagctctccagaggtacattcctgggggattcagggagcagggaggtgctcctacaggagaagcaggagaaaaatcatgcagtaggatga

SEQ ID NO: 2 - protein, 323 aa, Homo sapiens
MYKDCIESTGDYFLLCDAEGPWGIILESLAILGIVVTILLLLAFLFLMRKIQDCSQWNVLPTQLLFLLSVLGLFGLAFAFIIELNQQTAPVRYFLFGVLFALCFSCLLAHASNLVKLVRGCVSFSWTTILCIAIGCSLLQIIIATEYVTLIMTRGMMFVNMTPCQLNVDFVVLLVYVLFLMALTFFVSKATFCGPCENWKQHGRLIFITVLFSIIIWVVWISMLLRGNPQFQRQPQWDDPVVCIALVTNAWVFLLLYIVPELCILYRSCRQECPLQGNACPVTAYQHSFQVENQELSRGTFLGDSGSREVLLQEKQEKNHAVG

SEQ ID NO: 3 - DNA, 1107 bp, Homo sapiens
  CDS (1)..(1107)
atgccccgccttggcacttcagccacaacaaaccccccacggcacaatggtgcatatgccctgaggcttggaattgggttgcttttatgtacaaggctagctgggctttttcatcgttgccctgaagagacacctgtttgccactcctctccctggctgagtcctctggcatccatggtgggtggtcgagccaagaatttgtggtatggagcttgtgtggcggcgctggtggccctgttagctgccgtgcgcttgtggcttcgccgctatggtaatctcaagagccccgagccacccatgctctttgtgcgctggggactgcccctaatggcattgggtactgctgcctactgggcattggcgtcgggggcagatgaggctcccccccgtctccgggtcctggtctctggggcatccatggtgctgcctcgggctgtagcagggctggctgcttcagggctcgcgctgctgctctggaagcctgtgacagtgctggtgaaggctggggcaggcgctccaaggaccaggactgtcctcactcccttctcaggcccccccacttctcaagctgacttggattatgtggtccctcaaatctaccgacacatgcaggaggagttccggggccggttagagaggaccaaatctcagggtcccctgactgtggctgcttatcagttggggagtgtctactcagctgctatggtcacagccctcaccctgttggccttcccacttctgctgttgcatgcggagcgcatcagccttgtgttcctgcttctgtttctgcagagcttccttctcctacatctgcttgctgctgggatacccgtcaccacccctggtaaatatctcagctctgattcacttaaagacaatagtgatgtgagttcggcccctcttgttttcaaggaggtgttgctcctcatgttcctgagcttgacagagggtcccatgccccacacaactaggaaggtcttcttggtgtcctctctcttacctgccatagccaagcaaattgatccctcctgttggttcccagggttcatggagaggagagacaaggagtcctctaagactccctgtggaaatgctgcatcctcatga

SEQ ID NO: 4 - protein, 368 aa, Homo sapiens
MPRLGTSATTNPPRHNGAYALRLGIGLLLCTRLAGLFHRCPEETPVCHSSPWLSPLASMVGGRAKNLWYGACVAALVALLAAVRLWLRRYGNLKSPEPPMLFVRWGLPLMALGTAAYWALASGADEAPPRLRVLVSGASMVLPRAVAGLAASGLALLLWKPVTVLVKAGAGAPRTRTVLTPFSGPPTSQADLDYVVPQIYRHMQEEFRGRLERTKSQGPLTVAAYQLGSVYSAAMVTALTLLAFPLLLLHAERISLVFLLLFLQSFLLLHLLAAGIPVTTPGKYLSSDSLKDNSDVSSAPLVFKEVLLLMFLSLTEGPMPHTTRKVFLVSSLLPAIAKQIDPSCWFPGFMERRDKESSKTPCGNAASS

SEQ ID NO: 5 - DNA, 1272 bp, Homo sapiens
  CDS (1)..(1272)
atgttgtgtcaccgtggtggccagctgatagtgccaatcatcccactttgccctgagcactcctgcaggggtagaagactccagaaccttctctcaggcccatggcccaagcagcccatggaacttcataacctgagctctccatctccctctctctcctcctctgttctccctccctccttctctccctcaccctcctctgctccctctgcctttaccactgtgggggggtcctctggagggccctgccaccccacctcttcctcgctggtgtctgccttcctggcaccaatcctggccctggagtttgtcctgggcctggtggggaacagtttggccctcttcatcttctgcatccacacgcggccctggacctccaacacggtgttcctggtcagcctggtggccgctgacttcctcctgatcagcaacctgcccctccgcgtggactactacctcctccatgagacctggcgctttggggctgctgcctgcaaagtcaacctcttcatgctgtccaccaaccgcacggccagcgttgtcttcctcacagccatcgcactcaaccgctacctgaaggtggtgcagccccaccacgtgctgagccgtgcttccgtgggggcagctgcccgggtggccgggggactctgggtgggcatcctgctcctcaacgggcacctgctcctgagcaccttctccggcccctcctgcctcagctacagggtgggcacgaagccctcggcctcgctccgctggcaccaggcactgtacctgctggagttcttcctgccactggcgctcatcctctttgctattgtgagcattgggctcaccatccggaaccgtggtctgggcgggcaggcaggcccgcagagggccatgcgtgtgctggccatggtggtggccgtctacaccatctgcttcttgcccagcatcatctttggcatggcttccatggtggctttctggctgtccgcctgccgatccctggacctctgcacacagctcttccatggctccctggccttcacctacctcaacagtgtcctggaccccgtgctctactgcttctctagccccaacttcctccaccagagccgggccttgctgggcctcacgcggggccggcagggcccagtgagcgacgagagctcctaccaaccctccaggcagtggcgctaccgggaggcctctaggaaggcggaggccatagggaagctgaaagtgcagggcgaggtctctctggaaaaggaaggctcctcccagggctga

SEQ ID NO: 6 - protein, 423 aa, Homo sapiens
MLCHRGGQLIVPIIPLCPEHSCRGRRLQNLLSGPWPKQPMELHNLSSPSPSLSSSVLPPSFSPSPSSAPSAFTTVGGSSGGPCHPTSSSLVSAFLAPILALEFVLGLVGNSLALFIFCIHTRPWTSNTVFLVSLVAADFLLISNLPLRVDYYLLHETWRFGAAACKVNLFMLSTNRTASVVFLTAIALNRYLKVVQPHHVLSRASVGAAARVAGGLWVGILLLNGHLLLSTFSGPSCLSYRVGTKPSASLRWHQALYLLEFFLPLALILFAIVSIGLTIRNRGLGGQAGPQRAMRVLAMVVAVYTICFLPSIIFGMASMVAFWLSACRSLDLCTQLFHGSLAFTYLNSVLDPVLYCFSSPNFLHQSRALLGLTRGRQGPVSDESSYQPSRQWRYREASRKAEAIGKLKVQGEVSLEKEGSSQG

SEQ ID NO: 7 - DNA, 1041 bp, Homo sapiens
  CDS (1)..(1041)
atgtacaacgggtcgtgctgccgcatcgagggggacaccatctcccaggtgatgccgccgctgctcattgtggcctttgtgctgggcgcactaggcaatggggtcgccctgtgtggtttctgcttccacatgaagacctggaagcccagcactgtttaccttttcaatttggccgtggctgatttcctccttatgatctgcctgccttttcggacagactattacctcagacgtagacactgggcttttggggacattccctgccgagtggggctcttcacgttggccatgaacagggccgggagcatcgtgttccttacggtggtggctgcggacaggtatttcaaagtggtccacccccaccacgcggtgaacactatctccacccgggtggcggctggcatcgtctgcaccctgtgggccctggtcatcctgggaacagtgtatcttttgctggagaaccatctctgcgtgcaagagacggccgtctcctgtgagagcttcatcatggagtcggccaatggctggcatgacatcatgttccagctggagttctttatgcccctcggcatcatcttattttgctccttcaagattgtttggagcctgaggcggaggcagcagctggccagacaggctcggatgaagaaggcgacccggttcatcatggtggtggcaattgtgttcatcacatgctacctgcccagcgtgtctgctagactctatttcctctggacggtgccctcgagtgcctgcgatccctctgtccatggggccctgcacataaccctcagcttcacctacatgaacagcatgctggatcccctggtgtattatttttcaagcccctcctttcccaaattctacaacaagctcaaaatctgcagtctgaaacccaagcagccaggacactcaaaaacacaaaggccggaagagatgccaatttcgaacctcggtcgcaggagttgcatcagtgtggcaaatagtttccaaagccagtctgatgggcaatgggatccccacattgttgagtggcactga

SEQ ID NO: 8 - protein, 346 aa, Homo sapiens
MYNGSCCRIEGDTISQVMPPLLIVAFVLGALGNGVALCGFCFHMKTWKPSTVYLFNLAVADFLLMICLPFRTDYYLRRRHWAFGDIPCRVGLFTLAMNRAGSIVFLTVVAADRYFKVVHPHHAVNTISTRVAAGIVCTLWALVILGTVYLLLENHLCVQETAVSCESFIMESANGWHDIMFQLEFFMPLGIILFCSFKIVWSLRRRQQLARQARMKKATRFIMVVAIVFITCYLPSVSARLYFLWTVPSSACDPSVHGALHITLSFTYMNSMLDPLVYYFSSPSFPKFYNKLKICSLKPKQPGHSKTQRPEEMPISNLGRRSCISVANSFQSQSDGQWDPHIVEWH

SEQ ID NO: 9 - DNA, 1413 bp, Homo sapiens
  CDS (1)..(1413)
atggacactaccatggaagctgacctgggtgccactggccacaggccccgcacagagcttgatgatgaggactcctacccccaaggtggctgggacacggtcttcctggtggccctgctgctccttgggctgccagccaatgggttgatggcgtggctggccggctcccaggcccggcatggagctggcacgcgtctggcgctgctcctgctcagcctggccctctctgacttcttgttcctggcagcagcggccttccagatcctagagatccggcatgggggacactggccgctggggacagctgcctgccgcttctactacttcctatggggcgtgtcctactcctccggcctcttcctgctggccgccctcagcctcgaccgctgcctgctggcgctgtgcccacactggtaccctgggcaccgcccagtccgcctgcccctctgggtctgcgccggtgtctgggtgctggccacactcttcagcgtgccctggctggtcttccccgaggctgccgtctggtggtacgacctggtcatctgcctggacttctgggacagcgaggagctgtcgctgaggatgctggaggtcctggggggcttcctgcctttcctcctgctgctcgtctgccacgtgctcacccaggccacagcctgtcgcacctgccaccgccaacagcagcccgcagcctgccggggcttcgcccgtgtggccaggaccattctgtcagcctatgtggtcctgaggctgccctaccagctggcccagctgctctacctggccttcctgtgggacgtctactctggctacctgctctgggaggccctggtctactccgactacctgatcctactcaacagctgcctcagccccttcctctgcctcatggccagtgccgacctccggaccctgctgcgctccgtgctctcgtccttcgcggcagctctctgcgaggagcggccgggcagcttcacgcccactgagccacagacccagctagattctgagggtccaactctgccagagccgatggcagaggcccagtcacagatggatcctgtggcccagcctcaggtgaaccccacactccagccacgatcggatcccacagctcagccacagctgaaccctacggcccagccacagtcggatcccacagcccagccacagctgaacctcatggcccagccacagtcagattctgtggcccagccacaggcagacactaacgtccagacccctgcacctgctgccagttctgtgcccagtccctgtgatgaagcttccccaaccccatcctcgcatcctaccccaggggcccttgaggacccagccacacctcctgcctctgaaggagaaagccccagcagcaccccgccagaggcggccccgggcgcaggccccacgtga

SEQ ID NO: 10 - protein, 470 aa, Homo sapiens
MDTTMEADLGATGHRPRTELDDEDSYPQGGWDTVFLVALLLLGLPANGLMAWLAGSQARHGAGTRLALLLLSLALSDFLFLAAAAFQILEIRHGGHWPLGTAACRFYYFLWGVSYSSGLFLLAALSLDRCLLALCPHWYPGHRPVRLPLWVCAGVWVLATLFSVPWLVFPEAAVWWYDLVICLDFWDSEELSLRMLEVLGGFLPFLLLLVCHVLTQATACRTCHRQQQPAACRGFARVARTILSAYVVLRLPYQLAQLLYLAFLWDVYSGYLLWEALVYSDYLILLNSCLSPFLCLMASADLRTLLRSVLSSFAAALCEERPGSFTPTEPQTQLDSEGPTLPEPMAEAQSQMDPVAQPQVNPTLQPRSDPTAQPQLNPTAQPQSDPTAQPQLNLMAQPQSDSVAQPQADTNVQTPAPAASSVPSPCDEASPTPSSHPTPGALEDPATPPASEGESPSSTPPEAAPGAGPT

SEQ ID NO: 11 - DNA, 1119 bp, Homo sapiens
  CDS (1)..(1119)
atgttagccaacagctcctcaaccaacagttctgttctcccgtgtcctgactaccgacctacccaccgcctgcacttggtggtctacagcttggtgctggctgccgggctccccctcaacgcgctagccctctgggtcttcctgcgcgcgctgcgcgtgcactcggtggtgagcgtgtacatgtgtaacctggcggccagcgacctgctcttcaccctctcgctgcccgttcgtctctcctactacgcactgcaccactggcccttccccgacctcctgtgccagacgacgggcgccatcttccagatgaacatgtacggcagctgcatcttcctgatgctcatcaacgtggaccgctacgccgccatcgtgcacccgctgcgactgcgccacctgcggcggccccgcgtggcgcggctgctctgcctgggcgtgtgggcgctcatcctggtgtttgccgtgcccgccgcccgcgtgcacaggccctcgcgttgccgctaccgggacctcgaggtgcgcctatgcttcgagagcttcagcgacgagctgtggaaaggcaggctgctgcccctcgtgctgctggccgaggcgctgggcttcctgctgcccctggcggcggtggtctactcgtcgggccgagtcttctggacgctggcgcgccccgacgccacgcagagccagcggcggcggaagaccgtgcgcctcctgctggctaacctcgtcatcttcctgctgtgcttcgtgccctacaacagcacgctggcggtctacgggctgctgcggagcaagctggtggcggccagcgtgcctgcccgcgatcgcgtgcgcggggtgctgatggtgatggtgctgctggccggcgccaactgcgtgctggacccgctggtgtactactttagcgccgagggcttccgcaacaccctgcgcggcctgggcactccgcaccgggccaggacctcggccaccaacgggacgcgggcggcgctcgcgcaatccgaaaggtccgccgtcaccaccgacgccaccaggccggatgccgccagtcaggggctgctccgaccctccgactcccactctctgtcttccttcacacagtgtccccaggattccgccctctga

SEQ ID NO: 12 - protein, 372 aa, Homo sapiens [sequence omitted]

SEQ ID NO: 13 - DNA, 1014 bp, Homo sapiens
  CDS (1)..(1014)
atgaatgagccactagactatttagcaaatgcttctgatttccccgattatgcagctgcttttggaaattgcactgatgaaaacatcccactcaagatgcactacctccctgttatttatggcattatcttcctcgtgggatttccaggcaatgcagtagtgatatccacttacattttcaaaatgagaccttggaagagcagcaccatcattatgctgaacctggcctgcacagatctgctgtatctgaccagcctccccttcctgattcactactatgccagtggcgaaaactggatctttggagatttcatgtgtaagtttatccgcttcagcttccatttcaacctgtatagcagcatcctcttcctcacctgtttcagcatcttccgctactgtgtgatcattcacccaatgagctgcttttccattcacaaaactcgatgtgcagttgtagcctgtgctgtggtgtggatcatttcactggtagctgtcattccgatgaccttcttgatcacatcaaccaacaggaccaacagatcagcctgtctcgacctcaccagttcggatgaactcaatactattaagtggtacaacctgattttgactgcaactactttctgcctccccttggtgatagtgacactttgctataccacgattatccacactctgacccatggactgcaaactgacagctgccttaagcagaaagcacgaaggctaaccattctgctactccttgcattttacgtatgttttttacccttccatatcttgagggtcattcggatcgaatctcgcctgctttcaatcagttgttccattgagaatcagatccatgaagcttacatcgtttctagaccattagctgctctgaacacctttggtaacctgttactatatgtggtggtcagcgacaactttcagcaggctgtctgctcaacagtgagatgcaaagtaagcgggaaccttgagcaagcaaagaaaattagttactcaaacaacccttga

SEQ ID NO: 14 - protein, 337 aa, Homo sapiens
MNEPLDYLANASDFPDYAAAFGNCTDENIPLKMHYLPVIYGIIFLVGFPGNAVVISTYIFKMRPWKSSTIIMLNLACTDLLYLTSLPFLIHYYASGENWIFGDFMCKFIRFSFHFNLYSSILFLTCFSIFRYCVIIHPMSCFSIHKTRCAVVACAVVWIISLVAVIPMTFLITSTNRTNRSACLDLTSSDELNTIKWYNLILTATTFCLPLVIVTLCYTTIIHTLTHGLQTDSCLKQKARRLTILLLLAFYVCFLPFHILRVIRIESRLLSISCSIENQIHEAYIVSRPLAALNTFGNLLLYVVVSDNFQQAVCSTVRCKVSGNLEQAKKISYSNNP

SEQ ID NO: 15 - DNA, 993 bp, Homo sapiens
  CDS (1)..(993)
atggatccaaccaccccggcctggggaacagaaagtacaacagtgaatggaaatgaccaagcccttcttctgctttgtggcaaggagaccctgatcccggtcttcctgatccttttcattgccctggtcgggctggtaggaaacgggtttgtgctctggctcctgggcttccgcatgcgcaggaacgccttctctgtctacgtcctcagcctggccggggccgacttcctcttcctctgcttccagattataaattgcctggtgtacctcagtaacttcttctgttccatctccatcaatttccctagcttcttcaccactgtgatgacctgtgcctaccttgcaggcctgagcatgctgagcaccgtcagcaccgagcgctgcctgtccgtcctgtggcccatctggtatcgctgccgccgccccagacacctgtcagcggtcgtgtgtgtcctgctctgggccctgtccctactgctgagcatcttggaagggaagttctgtggcttcttatttagtgatggtgactctggttggtgtcagacatttgatttcatcactgcagcgtggctgatttttttattcatggttctctgtgggtccagtctggccctgctggtcaggatcctctgtggctccaggggtctgccactgaccaggctgtacctgaccatcctgctcacagtgctggtgttcctcctctgcggcctgccctttggcattcagtggttcctaatattatggatctggaaggattctgatgtcttattttgtcatattcatccagtttcagttgtcctgtcatctcttaacagcagtgccaaccccatcatttacttcttcgtgggctcttttaggaagcagtggcggctgcagcagccgatcctcaagctggctctccagagggctctgcaggacattgctgaggtggatcacagtgaaggatgcttccgtcagggcaccccggagatgtcgagaagcagtctggtgtag

SEQ ID NO: 16 - protein, 330 aa, Homo sapiens
MDPTTPAWGTESTTVNGNDQALLLLCGKETLIPVFLILFIALVGLVGNGFVLWLLGFRMRRNAFSVYVLSLAGADFLFLCFQIINCLVYLSNFFCSISINFPSFFTTVMTCAYLAGLSMLSTVSTERCLSVLWPIWYRCRRPRHLSAVVCVLLWALSLLLSILEGKFCGFLFSDGDSGWCQTFDFITAAWLIFLFMVLCGSSLALLVRILCGSRGLPLTRLYLTILLTVLVFLLCGLPFGIQWFLILWIWKDSDVLFCHIHPVSVVLSSLNSSANPIIYFFVGSFRKQWRLQQPILKLALQRALQDIAEVDHSEGCFRQGTPEMSRSSLV

SEQ ID NO: 17 - DNA, 1011 bp, Homo sapiens
  CDS (1)..(1011)
atgaacaacaatacaacatgtattcaaccatctatgatctcttccatggctttaccaatcatttacatcctcctttgtattgttggtgtttttggaaacactctctctcaatggatatttttaacaaaaataggtaaaaaaacatcaacgcacatctacctgtcacaccttgtgactgcaaacttacttgtgtgcagtgccatgcctttcatgagtatctatttcctgaaaggtttccaatgggaatatcaatctgctcaatgcagagtggtcaattttctgggaactctatccatgcatgcaagtatgtttgtcagtctcttaattttaagttggattgccataagccgctatgctaccttaatgcaaaaggattcctcgcaagagactacttcatgctatgagaaaatattttatggccatttactgaaaaaatttcgccagcccaactttgctagaaaactatgcatttacatatggggagttgtactgggcataatcattccagttaccgtatactactcagtcatagaggctacagaaggagaagagagcctatgctacaatcggcagatggaactaggagccatgatctctcagattgcaggtctcattggaaccacatttattggattttcctttttagtagtactaacatcatactactcttttgtaagccatctgagaaaaataagaacctgtacgtccattatggagaaagatttgacttacagttctgtgaaaagacatcttttggtcatccagattctactaatagtttgcttccttccttatagtatttttaaacccattttttatgttctacaccaaagagataactgtcagcaattgaattatttaatagaaacaaaaaacattctcacctgtcttgcttcggccagaagtagcacagaccccattatatttcttttattagataaaacattcaagaagacactatataatctctttacaaagtctaattcagcacatatgcaatcatatggttga

SEQ ID NO: 18 - protein, 336 aa, Homo sapiens
MNNNTTCIQPSMISSMALPIIYILLCIVGVFGNTLSQWIFLTKIGKKTSTHIYLSHLVTANLLVCSAMPFMSIYFLKGFQWEYQSAQCRVVNFLGTLSMHASMFVSLLILSWIAISRYATLMQKDSSQETTSCYEKIFYGHLLKKFRQPNFARKLCIYIWGVVLGIIIPVTVYYSVIEATEGEESLCYNRQMELGAMISQIAGLIGTTFIGFSFLVVLTSYYSFVSHLRKIRTCTSIMEKDLTYSSVKRHLLVIQILLIVCFLPYSIFKPIFYVLHQRDNCQQLNYLIETKNILTCLASARSSTDPIIFLLLDKTFKKTLYNLFTKSNSAHMQSYG

SEQ ID NO: 19 - DNA, 1044 bp, Homo sapiens
  CDS (1)..(1044)
atgggggatgagctggcaccttgccctgtgggcactacagcttggccggccctgatccagctcatcagcaagacaccctgcatgccccaagcagccagcaacacttccttgggcctgggggacctcagggtgcccagctccatgctgtactggcttttccttccctcaagcctgctggctgcagccacactggctgtcagccccctgctgctggtgaccatcctgcggaaccaacggctgcgacaggagccccactacctgctcccggctaacatcctgctctcagacctggcctacattctcctccacatgctcatctcctccagcagcctgggtggctgggagctgggccgcatggcctgtggcattctcactgatgctgtcttcgccgcctgcaccagcaccatcctgtccttcaccgccattgtgctgcacacctacctggcagtcatccatccactgcgctacctctccttcatgtcccatggggctgcctggaaggcagtggccctcatctggctggtggcctgctgcttccccacattccttatttggctcagcaagtggcaggatgcccagctggaggagcaaggagcttcatacatcctaccaccaagcatgggcacccagccgggatgtggcctcctggtcattgttacctacacctccattctgtgcgttctgttcctctgcacagctctcattgccaactgtttctggaggatctatgcagaggccaagacttcaggcatctgggggcagggctattcccgggccaggggcaccctgctgatccactcagtgctgatcacattgtacgtgagcacaggggtggtgttctccctggacatggtgctgaccaggtaccaccacattgactctgggactcacacatggctcctggcagctaacagtgaggtactcatgatgcttccccgtgccatgctcacatacctgtacctgctccgctaccggcagctgttgggcatggtccggggccacctcccatccaggaggcaccaggccatctttaccatttcctag

SEQ ID NO: 20 - protein, 347 aa, Homo sapiens
MGDELAPCPVGTTAWPALIQLISKTPCMPQAASNTSLGLGDLRVPSSMLYWLFLPSSLLAAATLAVSPLLLVTILRNQRLRQEPHYLLPANILLSDLAYILLHMLISSSSLGGWELGRMACGILTDAVFAACTSTILSFTAIVLHTYLAVIHPLRYLSFMSHGAAWKAVALIWLVACCFPTFLIWLSKWQDAQLEEQGASYILPPSMGTQPGCGLLVIVTYTSILCVLFLCTALIANCFWRIYAEAKTSGIWGQGYSRARGTLLIHSVLITLYVSTGVVFSLDMVLTRYHHIDSGTHTWLLAANSEVLMMLPRAMLTYLYLLRYRQLLGMVRGHLPSRRHQAIFTIS

SEQ ID NO: 21 - DNA, 1158 bp, Homo sapiens
  CDS (1)..(1158)
  modified_base (43)..(142): a, t, c, g, other or unknown
atggagaggtcttttctttccgccgcggccgagcaattgtgtnnnnnnnnnnnnnnnnnnnnnnnnnnnnnnnnnnnnnnnnnnnnnnnnnnnnnnnnnnnnnnnnnnnnnnnnnnnnnnnnnnnnnnnnnnnnnnnnnnnntgaggtccctgcctaggccccataggagccaacgaagtcatctttgcttcagagctaaaccagtttttcttctctccacagcaaatatcttgacagtgatcatcctctcccagctggtggcaagaagacagaagtcctcctacaactatctcttggcactcgctgctgccgacatcttggtcctctttttcatagtgtttgtggacttcctgttggaagatttcatcttgaacatgcagatgcctcaggtccccgacaagatcatagaagtgctggaattctcatccatccacacctccatatggattactgtaccgttaaccattgacaggtatatcgctgtctgccacccgctcaagtaccacacggtctcatacccagcccgcacccggaaagtcattgtaagtgtttacatcacctgcttcctgaccagcatcccctattactggtggcccaacatctggactgaagactacatcagcacctctgtgcatcacgtcctcatctggatccactgcttcaccgtctacctggtgccctgctccatcttcttcatcttgaactcaatcattgtgtacaagctcaggaggaagagcaattttcgtctccgtggctactccacggggaagaccaccgccatcttgttcaccattacctccatctttgccacactttgggccccccgcatcatcatgattctttaccacctctatggggcgcccatccagaaccgctggctggtacacatcatgtccgacattgccaacatgctagcccttctgaacacagccatcaacttcttcctctactgcttcatcagcaagcggttccgcaccatggcagccgccacgctcaaggctttcttcaagtgccagaagcaacctgtacagttctacaccaatcataacttttccataacaagtagcccctggatctcgccggcaaactcacactgcatcaagatgctggtgtaccagtatgacaaaaatggaaaacctataaaagtatccccgtga

SEQ ID NO: 22 - protein, 385 aa, Homo sapiens
  MOD_RES (15)..(48): Variable amino acid
MERSFLSAAAEQLCXXXXXXXXXXXXXXXXXXXXXXXXXXXXXXXXXXRSLPRPHRSQRSHLCFRAKPVFLLSTANILTVIILSQLVARRQKSSYNYLLALAAADILVLFFIVFVDFLLEDFILNMQMPQVPDKIIEVLEFSSIHTSIWITVPLTIDRYIAVCHPLKYHTVSYPARTRKVIVSVYITCFLTSIPYYWWPNIWTEDYISTSVHHVLIWIHCFTVYLVPCSIFFILNSIIVYKLRRKSNFRLRGYSTGKTTAILFTITSIFATLWAPRIIMILYHLYGAPIQNRWLVHIMSDIANMLALLNTAINFFLYCFISKRFRTMAAATLKAFFKCQKQPVQFYTNHNFSITSSPWISPANSHCIKMLVYQYDKNGKPIKVSP

SEQ ID NO: 23 - DNA, 1197 bp, Homo sapiens
  CDS (1)..(1197)
atggagtcggggctgctgcggccggcgccggtgagcgaggtcatcgtcctgcattacaactacaccggcaagctccgcggtgcgcgctaccagccgggtgccggcctgcgcgccgacgccgtggtgtgcctggcggtgtgcgccttcatcgtgctagagaatctagccgtgttgttggtgctcggacgccacccgcgcttccacgctcccatgttcctgctcctgggcagcctcacgttgtcggatctgctggcaggcgccgcctacgccgccaacatcctactgtcggggccgctcacgctgaaactgtcccccgcgctctggttcgcacgggagggaggcgtcttcgtggcactcactgcgtccgtgctgagcctcctggccatcgcgctggagcgcagcctcaccatggcgcgcagggggcccgcgcccgtctccagtcgggggcgcacgctggcgatggcagccgcggcctggggcgtgtcgctgctcctcgggctcctgccagcgctgggctggaattgcctgggtcgcctggacgcttgctccactgtcttgccgctctacgccaaggcctacgtgctcttctgcgtgctcgccttcgtgggcatcctggccgctatctgtgcactctacgcgcgcatctactgccaggtacgcgccaacgcgcggcgcctgccggcacggcccgggactgcggggaccacctcgacccgggcgcgtcgcaagccgcgctcgctggccttgctgcgcacgctcagcgtggtgctcctggcctttgtggcatgttggggccccctcttcctgctgctgttgctcgacgtggcgtgcccggcgcgcacctgtcctgtactcctgcaggccgatcccttcctgggactggccatggccaactcacttctgaaccccatcatctacacgctcaccaaccgcgacctgcgccacgcgctcctgcgcctggtctgctgcggacgccactcctgcggcagagacccgagtggctcccagcagtcggcgagcgcggctgaggcttccgggggcctgcgccgctgcctgcccccgggccttgatgggagcttcagcggctcggagcgctcatcgccccagcgcgacgggctggacaccagcggctccacaggcagccccggtgcacccacagccgcccggactctggtatcagaaccggctgcagactga

SEQ ID NO: 24 - protein, 398 aa, Homo sapiens
MESGLLRPAPVSEVIVLHYNYTGKLRGARYQPGAGLRADAVVCLAVCAFIVLENLAVLLVLGRHPRFHAPMFLLLGSLTLSDLLAGAAYAANILLSGPLTLKLSPALWFAREGGVFVALTASVLSLLAIALERSLTMARRGPAPVSSRGRTLAMAAAAWGVSLLLGLLPALGWNCLGRLDACSTVLPLYAKAYVLFCVLAFVGILAAICALYARIYCQVRANARRLPARPGTAGTTSTRARRKPRSLALLRTLSVVLLAFVACWGPLFLLLLLDVACPARTCPVLLQADPFLGLAMANSLLNPIIYTLTNRDLRHALLRLVCCGRHSCGRDPSGSQQSASAAEASGGLRRCLPPGLDGSFSGSERSSPQRDGLDTSGSTGSPGAPTAARTLVSEPAAD

SEQ ID NO: 25 - DNA, 1029 bp, Homo sapiens
  CDS (1)..(1029)
atgcaagccgtcgacaacctcacctctgcgcctggtaacaccagtctgtgcaccagagactacaaaatcacccaggtcctcttcccactgctctacactgtcctgttttttgttggacttatcacaaatggcctggcgatgaggattttctttcaaatccggagtaaatcaaactttattatttttcttaagaacacagtcatttctgatcttctcatgattctgacttttccattcaaaattcttagtgatgccaaactgggaacaggaccactgagaacttttgtgtgtcaagttacctccgtcatattttatttcacaatgtatatcagtatttcattcctgggactgataactatcgatcgctaccagaagaccaccaggccatttaaaacatccaaccccaaaaatctcttgggggctaagattctctctgttgtcatctgggcattcatgttcttactctctttgcctaacatgattctgaccaacaggcagccgagagacaagaatgtgaagaaatgctctttccttaaatcagagttcggtctagtctggcatgaaatagtaaattacatctgtcaagtcattttctggattaatttcttaattgttattgtatgttatacactcattacaaaagaactgtaccggtcatacgtaagaacgaggggtgtaggtaaagtccccaggaaaaaggtgaacgtcaaagttttcattatcattgctgtattctttatttgttttgttcctttccattttgcccgaattccttacaccctgagccaaacccgggatgtctttgactgcactgctgaaaatactctgttctatgtgaaagagagcactctgtggttaacttccttaaatgcatgcctggatccgttcatctattttttcctttgcaagtccttcagaaattccttgataagtatgctgaagtgccccaattctgcaacatctctgtcccaggacaataggaaaaaagaacaggatggtggtgacccaaatgaagagactccaatgtaa

SEQ ID NO: 26 - protein, 342 aa, Homo sapiens
MQAVDNLTSAPGNTSLCTRDYKITQVLFPLLYTVLFFVGLITNGLAMRIFFQIRSKSNFIIFLKNTVISDLLMILTFPFKILSDAKLGTGPLRTFVCQVTSVIFYFTMYISISFLGLITIDRYQKTTRPFKTSNPKNLLGAKILSVVIWAFMFLLSLPNMILTNRQPRDKNVKKCSFLKSEFGLVWHEIVNYICQVIFWINFLIVIVCYTLITKELYRSYVRTRGVGKVPRKKVNVKVFIIIAVFFICFVPFHFARIPYTLSQTRDVFDCTAENTLFYVKESTLWLTSLNACLDPFIYFFLCKSFRNSLISMLKCPNSATSLSQDNRKKEQDGGDPNEETPM

SEQ ID NO: 27 - DNA, 1260 bp, Homo sapiens
  CDS (1)..(1260)
atgctggcagctgcctttgcagactctaactccagcagcatgaatgtgtcctttgctcacctccactttgccggagggtacctgccctctgattcccaggactggagaaccatcatcccggctctcttggtggctgtctgcctggtgggcttcgtgggaaacctgtgtgtgattggcatcctccttcacaatgcttggaaaggaaagccatccatgatccactccctgattctgaatctcagcctggctgatctctccctcctgctgttttctgcacctatccgagctacggcgtactccaaaagtgtttgggatctaggctggtttgtctgcaagtcctctgactggtttatccacacatgcatggcagccaagagcctgacaatcgttgtggtggccaaagtatgcttcatgtatgcaagtgacccagccaagcaagtgagtatccacaactacaccatctggtcagtgctggtggccatctggactgtggctagcctgttacccctgccggaatggttctttagcaccatcaggcatcatgaaggtgtggaaatgtgcctcgtggatgtaccagctgtggctgaagagtttatgtcgatgtttggtaagctctacccactcctggcatttggccttccattattttttgccagcttttatttctggagagcttatgaccaatgtaaaaaacgaggaactaagactcaaaatcttagaaaccagatacgctcaaagcaagtcacagtgatgctgctgagcattgccatcatctctgctctcttgtggctccccgaatgggtagcttggctgtgggtatggcatctgaaggctgcaggcccggccccaccacaaggtttcatagccctgtctcaagtcttgatgttttccatctcttcagcaaatcctctcatttttcttgtgatgtcggaagagttcagggaaggcttgaaaggtgtatggaaatggatgataaccaaaaaacctccaactgtctcagagtctcaggaaacaccagctggcaactcagagggtcttcctgacaaggttccatctccagaatccccagcatccataccagaaaaagagaaacccagctctccctcctctggcaaagggaaaactgagaaggcagagattcccatccttcctgacgtagagcagttttggcatgagagggacacagtcccttctgtacaggacaatgaccctatcccctgggaacatgaagatcaagagacaggggaaggtgttaaatag

SEQ ID NO: 28 - protein, 419 aa, Homo sapiens
MLAAAFADSNSSSMNVSFAHLHFAGGYLPSDSQDWRTIIPALLVAVCLVGFVGNLCVIGILLHNAWKGKPSMIHSLILNLSLADLSLLLFSAPIRATAYSKSVWDLGWFVCKSSDWFIHTCMAAKSLTIVVVAKVCFMYASDPAKQVSIHNYTIWSVLVAIWTVASLLPLPEWFFSTIRHHEGVEMCLVDVPAVAEEFMSMFGKLYPLLAFGLPLFFASFYFWRAYDQCKKRGTKTQNLRNQIRSKQVTVMLLSIAIISALLWLPEWVAWLWVWHLKAAGPAPPQGFIALSQVLMFSISSANPLIFLVMSEEFREGLKGVWKWMITKKPPTVSESQETPAGNSEGLPDKVPSPESPASIPEKEKPSSPSSGKGKTEKAEIPILPDVEQFWHERDTVPSVQDNDPIPWEHEDQETGEGVK

SEQ ID NO: 29 - DNA, 1356 bp, Homo sapiens
  CDS (1)..(1356)
atggagtcctcacccatcccccagtcatcagggaactcttccactttggggagggtccctcaaaccccaggtccctctactgccagtggggtcccggaggtggggctacgggatgttgcttcggaatctgtggccctcttcttcatgctcctgctggacttgactgctgtggctggcaatgccgctgtgatggccgtgatcgccaagacgcctgccctccgaaaatttgtcttcgtcttccacctctgcctggtggacctgctggctgccctgaccctcatgcccctggccatgctctccagctctgccctctttgaccacgccctctttggggaggtggcctgccgcctctacttgtttctgagcgtgtgctttgtcagcctggccatcctctcggtgtcagccatcaatgtggagcgctactattacgtagtccaccccatgcgctacgaggtgcgcatgacgctggggctggtggcctctgtgctggtgggtgtgtgggtgaaggccttggccatggcttctgtgccagtgttgggaagggtctcctgggaggaaggagctcccagtgtccccccaggctgttcactccagtggagccacagtgcctactgccagctttttgtggtggtctttgctgtcctttactttctgttgcccctgctcctcatacttgtggtctactgcagcatgttccgagtggcccgcgtggctgccatgcagcacgggccgctgcccacgtggatggagacaccccggcaacgctccgaatctctcagcagccgctccacgatggtcaccagctcgggggccccccagaccaccccacaccggacgtttgggggagggaaagcagcagtggttctcctggctgtggggggacagttcctgctctgttggttgccctacttctctttccacctctatgttgccctgagtgctcagcccatttcaactgggcaggtggagagtgtggtcacctggattggctacttttgcttcacttccaaccctttcttctatggatgtctcaaccggcagatccggggggagctcagcaagcagtttgtctgcttcttcaagccagctccagaggaggagctgaggctgcctagccgggagggctccattgaggagaacttcctgcagttccttcaggggactggctgtccttctgagtcctgggtttcccgacccctacccagccccaagcaggagccacctgctgttgactttcgaatcccaggccagatagctgaggagacctctgagttcctggagcagcaactcaccagcgacatcatcatgtcagacagctacctccgtcctgccgcctcaccccggctggagtcatga

SEQ ID NO: 30 - protein, 451 aa, Homo sapiens
MESSPIPQSSGNSSTLGRVPQTPGPSTASGVPEVGLRDVASESVALFFMLLLDLTAVAGNAAVMAVIAKTPALRKFVFVFHLCLVDLLAALTLMPLAMLSSSALFDHALFGEVACRLYLFLSVCFVSLAILSVSAINVERYYYVVHPMRYEVRMTLGLVASVLVGVWVKALAMASVPVLGRVSWEEGAPSVPPGCSLQWSHSAYCQLFVVVFAVLYFLLPLLLILVVYCSMFRVARVAAMQHGPLPTWMETPRQRSESLSSRSTMVTSSGAPQTTPHRTFGGGKAAVVLLAVGGQFLLCWLPYFSFHLYVALSAQPISTGQVESVVTWIGYFCFTSNPFFYGCLNRQIRGELSKQFVCFFKPAPEEELRLPSREGSIEENFLQFLQGTGCPSESWVSRPLPSPKQEPPAVDFRIPGQIAEETSEFLEQQLTSDIIMSDSYLRPAASPRLES

SEQ ID NO: 31 - DNA, 1251 bp, Homo sapiens
  CDS (1)..(1251)
atgggcaccaccatatctggagataacattggaaaaaatttcactttttctatgagaattaatgataccagcaatgaagtcactgggagagtgttgatcagcagagatgaacttcggaaggtgccttccccttctcaggtcatcagcattgcatttccaactattggggctattttggaagccagtcttttggaaaatgttactgtaaatgggcttgtcctgtctgccattttgcccaaggaacttaaaagaatctcactgatttttgaaaagatcagcaagtcagaggagaggaggacacagtgtgttggctggcactctgtggagaacagatgggaccagcaggcctgcaaaatgattcaagaaaactcccagcaagctgtttgcaaatgtaggccaagcaaattgtttacctctttctcaattcttatgtcacctcacatcttagagagtctgattctgacttacatcacatatgtaggcctgggcatttctatttgcagcctgatcctttgcttgtccattgaggtcctagtctggagccaagtgacaaagacagagatcacctatttacgccatgtgtgcattgttaacattgcagccactttgctgatggcagatgtgtggttcattgtggcttcctttcttagtggcccaataacacaccacaagggatgtgtggcagccacattttttgttcatttcttttacctttctgtatttttctggatgcttgccaaggcactccttatcctctatggaatcatgattgttttccataccttgcccaagtcagtcctggtggcatctctgttttcagtgggctatggatgccctttggccattgctgccatcactgttgctgccactgaacctggcaaaggctatctacgacctgagatctgctggctcaactgggacatgaccaaagccctcctggccttcgtgatcccagctttggccatcgtggtagtaaacctgatcacagtcacactggtgattgtcaagacccagcgagctgccattggcaattccatgttccaggaagtgagagccattgtgagaatcagcaagaacatcgccatcctcacaccacttctgggactgacctggggatttggagtagccactgtcatcgatgacagatccctggccttccacattatcttctccctgctcaatgcattccaggtaagtccagatgcttctgaccaagtgcaaagtgagagaattcatgaagatgttctgtga

SEQ ID NO: 32 - protein, 416 aa, Homo sapiens
MGTTISGDNIGKNFTFSMRINDTSNEVTGRVLISRDELRKVPSPSQVISIAFPTIGAILEASLLENVTVNGLVLSAILPKELKRISLIFEKISKSEERRTQCVGWHSVENRWDQQACKMIQENSQQAVCKCRPSKLFTSFSILMSPHILESLILTYITYVGLGISICSLILCLSIEVLVWSQVTKTEITYLRHVCIVNIAATLLMADVWFIVASFLSGPITHHKGCVAATFFVHFFYLSVFFWMLAKALLILYGIMIVFHTLPKSVLVASLFSVGYGCPLAIAAITVAATEPGKGYLRPEICWLNWDMTKALLAFVIPALAIVVVNLITVTLVIVKTQRAAIGNSMFQEVRAIVRISKNIAILTPLLGLTWGFGVATVIDDRSLAFHIIFSLLNAFQVSPDASDQVQSERIHEDVL

SEQ ID NO: 33 - DNA, 1026 bp, Homo sapiens
  CDS (1)..(1026)
  modified_base (899)..(998): a, t, c, g, other or unknown
  modified_base (1006): a, t, c, g, other or unknown
atggagtcctcacccatcccccagtcatcagggaactcttccactttggggagggtccctcaaaccccaggtccctctactgccagtggggtcccggaggtggggctacgggatgttgcttcggaatctgtggccctcttcttcatgctcctgctggacttgactgctgtggctggcaatgccgctgtgatggccgtgatcgccaagacgcctgccctccgaaaatttgtcttcgtcttccacctctgcctggtggacctgctggctgccctgaccctcatgcccctggccatgctctccagctctgccctctttgaccacgccctctttggggaggtggcctgccgcctctacttgtttctgagcgtgtgctttgtcagcctggccatcctctcggtgtcagccatcaatgtggagcgctactattacgtagtccaccccatgcgctacgaggtgcgcatgacgctggggctggtggcctctgtgctggtgggtgtgtgggtgaaggccttggccatggcttctgtgccagtgttgggaagggtctcctgggaggaaggagctcccagtgtccccccaggctgttcactccagtggagccacagtgcctactgccagctttttgtggtggtctttgctgtcctttactttctgttgcccctgctcctcatacttgtggtctactgcagcatgttccgagtggcccgcgtggctgccatgcagcacgggccgctgcccacgtggatggagacaccccggcaacgctccgaatctctcagcagccgctccacgatggtcaccagctcgggggccccccagaccaccccacaccggacgtttgggggagggaaagcagcagtggttctcctggctgtggggggacagttcctgctatgttnnnnnnnnnnnnnnnnnnnnnnnnnnnnnnnnnnnnnnnnnnnnnnnnnnnnnnnnnnnnnnnnnnnnnnnnnnnnnnnnnnnnnnnnnnnnnnnnnnnnacaccggnacgttatgggtggagtgtaa

SEQ ID NO: 34 - protein, 341 aa, Homo sapiens
  MOD_RES (300)..(333): Variable amino acid
  MOD_RES (336): Variable amino acid
MESSPIPQSSGNSSTLGRVPQTPGPSTASGVPEVGLRDVASESVALFFMLLLDLTAVAGNAAVMAVIAKTPALRKFVFVFHLCLVDLLAALTLMPLAMLSSSALFDHALFGEVACRLYLFLSVCFVSLAILSVSAINVERYYYVVHPMRYEVRMTLGLVASVLVGVWVKALAMASVPVLGRVSWEEGAPSVPPGCSLQWSHSAYCQLFVVVFAVLYFLLPLLLILVVYCSMFRVARVAAMQHGPLPTWMETPRQRSESLSSRSTMVTSSGAPQTTPHRTFGGGKAAVVLLAVGGQFLLCXXXXXXXXXXXXXXXXXXXXXXXXXXXXXXXXXXHRXVMGGV

SEQ ID NO: 35 - DNA, 1125 bp, Homo sapiens
  CDS (1)..(1125)
atgcccacactcaatacttctgcctctccacccacattcttctgggccaatgcctccggaggcagtgtgctgagtgctgatgatgctccgatgcctgtcaaattcctagccctgaggctcatggttgccctggcctatgggcttgtgggggccattggcttgctgggaaatttggcggtgctgtgggtactgagtaactgtgcccggagagcccctggcccaccttcagacaccttcgtcttcaacctggctctggcggacctgggactggcactcactctccccttttgggcagccgagtcggcactggactttcactggcccttcggaggtgccctctgcaagatggttctgacggccactgtcctcaacgtctatgccagcatcttcctcatcacagcgctgagcgttgctcgctactgggtggtggccatggctgcggggccaggcacccacctctcactcttctgggcccgaatagccaccctggcagtgtgggcggcggctgccctggtgacggtgcccacagctgtcttcggggtggagggtgaggtgtgtggtgtgcgcctttgcctgctgcgtttccccagcaggtactggctgggggcctaccagctgcagagggtggtgctggctttcatggtgcccttgggcgtcatcaccaccagctacctgctgctgctggccttcctgcagcggcggcaacggcggcggcaggacagcagggtcgtggcccgctctgtccgcatcctggtggcttccttcttcctctgctggtttcccaaccatgtggtcactctctggggtgtcctggtgaagtttgacctggtgccctggaacagtactttctatactatccagacgtatgtcttccctgtcactacttgcttggcacacagcaatagctgcctcaaccctgtgctgtactgtctcctgaggcgggagccccggcaggctctggcaggcaccttcagggatctgcggttgaggctgtggccccagggcggaggctgggtgcaacaggtggccctaaagcaggtaggcaggcggtgggtcgcaagcaacccccgggagagccgcccttctaccctgctcaccaacctggacagagggacacccgggtga

SEQ ID NO: 36 - protein, 374 aa, Homo sapiens
MPTLNTSASPPTFFWANASGGSVLSADDAPMPVKFLALRLMVALAYGLVGAIGLLGNLAVLWVLSNCARRAPGPPSDTFVFNLALADLGLALTLPFWAAESALDFHWPFGGALCKMVLTATVLNVYASIFLITALSVARYWVVAMAAGPGTHLSLFWARIATLAVWAAAALVTVPTAVFGVEGEVCGVRLCLLRFPSRYWLGAYQLQRVVLAFMVPLGVITTSYLLLLAFLQRRQRRRQDSRVVARSVRILVASFFLCWFPNHVVTLWGVLVKFDLVPWNSTFYTIQTYVFPVTTCLAHSNSCLNPVLYCLLRREPRQALAGTFRDLRLRLWPQGGGWVQQVALKQVGRRWVASNPRESRPSTLLTNLDRGTPG

SEQ ID NO: 37 - DNA, 1008 bp, Homo sapiens
  CDS (1)..(1008)
atggaatcatctttctcatttggagtgatccttgctgtcctggcctccctcatcattgctactaacacactagtggctgtggctgtgctgctgttgatccacaagaatgatggtgtcagtctctgcttcaccttgaatctggctgtggctgacaccttgattggtgtggccatctctggcctactcacagaccagctctccagcccttctcggcccacacagaagaccctgtgcagcctgcggatggcatttgtcacttcctccgcagctgcctctgtcctcacggtcatgctgatcacctttgacaggtaccttgccatcaagcagcccttccgctacttgaagatcatgagtgggttcgtggccggggcctgcattgccgggctgtggttagtgtcttacctcattggcttcctcccactcggaatccccatgttccagcagactgcctacaaagggcagtgcagcttctttgctgtatttcaccctcacttcgtgctgaccctctcctgcgttggcttcttcccagccatgctcctctttgtcttcttctactgcgacatgctcaagattgcctccatgcacagccagcagattcgaaagatggaacatgcaggagccatggctggaggttatcgatccccacggactcccagcgacttcaaagctctccgtactgtgtctgttctcattgggagctttgctctatcctggacccccttccttatcactggcattgtgcaggtggcctgccaggagtgtcacctctacctagtgctggaacggtacctgtggctgctcggcgtgggcaactccctgctcaacccactcatctatgcctattggcagaaggaggtgcgactgcagctctaccacatggccctaggagtgaagaaggtgctcacctcattcctcctctttctctcggccaggaattgtggcccagagaggcccagggaaagttcctgtcacatcgtcactatctccagctcagagtttgatggctaa

SEQ ID NO: 38 - protein, 335 aa, Homo sapiens
MESSFSFGVILAVLASLIIATNTLVAVAVLLLIHKNDGVSLCFTLNLAVADTLIGVAISGLLTDQLSSPSRPTQKTLCSLRMAFVTSSAAASVLTVMLITFDRYLAIKQPFRYLKIMSGFVAGACIAGLWLVSYLIGFLPLGIPMFQQTAYKGQCSFFAVFHPHFVLTLSCVGFFPAMLLFVFFYCDMLKIASMHSQQIRKMEHAGAMAGGYRSPRTPSDFKALRTVSVLIGSFALSWTPFLITGIVQVACQECHLYLVLERYLWLLGVGNSLLNPLIYAYWQKEVRLQLYHMALGVKKVLTSFLLFLSARNCGPERPRESSCHIVTISSSEFDG

SEQ ID NO: 39 - DNA, 822 bp, Homo sapiens
  CDS (1)..(822)
  modified_base (112): a, t, c, g, other or unknown
  modified_base (114): a, t, c, g, other or unknown
  modified_base (523): a, t, c, g, other or unknown
  modified_base (652): a, t, c, g, other or unknown
  modified_base (656): a, t, c, g, other or unknown
  modified_base (671): a, t, c, g, other or unknown
atgttggcacaagatccaaggagtttgggaggtggttttttttttttttttttttttttttcgctcccccccctggtggggctgttgggggcggattctgtgttttgtgttngngcgctcttttgcgtctgggcctgtgcttctgggggggttctgcttgggcctgctttgttgttttttctcccgcgttcgggcgccctgccctgtggtgtgccctggcgcgttgcgctttcggcggcttatttgttgggcggtccgccccaccgtggtgggttccggtcgctgttgtgcctctttccgggcgccgtggcttggcgtgtggggtggtccgcggctgtgtcttctccccgggtgctcttcggggcgtctcccttcgggcgcctctctggggggccgtgtgcgggcgcgtgcggctcgtcgcgctccctcccactgtttgtgtggggcggcggcttcttgccgcgccgcgttcgccggtgtgttgtgcgcggtctctcccgcgctttgcgtctcttaagattancggttgcggctgcgcgagcgggcgtcggcggcgtgcggcggtctgcgcgcgggggcggtcgcgctataaatacagatagagagaaaaacacgaaagaaagtattttaaaagagactcagacttgcatgnccgnttccgctactctagngaatccctgtatgtctgtccttaagttaatattccattctcttcatttttatcacatagtaaatttaaaatcaggtagggcaagtcttccaacttctttcatattttataaaggttttttgttcttcttttgcatttccatatacatttag

SEQ ID NO: 40 - protein, 273 aa, Homo sapiens
  MOD_RES (38): Variable amino acid
  MOD_RES (175): Variable amino acid
  MOD_RES (218)..(219): Variable amino acid
  MOD_RES (224): Variable amino acid
MLAQDPRSLGGGFFFFFFFFSLPPLVGLLGADSVFCVXALFCVWACASGGVLLGPALLFFLPRSGALPCGVPWRVALSAAYLLGGPPHRGGFRSLLCLFPGAVAWRVGWSAAVSSPRVLFGASPFGRLSGGPCAGACGSSRSLPLFVWGGGFLPRRVRRCVVRGLSRALRLLRLXVAAARAGVGGVRRSARGGGRAINTDREKNTKESILKETQTCMXXSATLXNPCMSVLKLIFHSLHFYHIVNLKSGRASLPTSFIFYKGFLFFFCISIYI

SEQ ID NO: 41 - DNA, 966 bp, Homo sapiens
  CDS (1)..(966)
atgaaccagactttgaatagcagtgggaccgtggagtcagccctaaactattccagagggagcacagtgcacacggcctacctggtgctgagctccctggccatgttcacctgcctgtgcgggatggcaggcaacagcatggtgatctggctgctgggctttcgaatgcacaggaaccccttctgcatctatatcctcaacctggcggcagccgacctcctcttcctcttcagcatggcttccacgctcagcctggaaacccagcccctggtcaataccactgacaaggtccacgagctgatgaagagactgatgtactttgcctacacagtgggcctgagcctgctgacggccatcagcacccagcgctgtctctctgtcctcttccctatctggttcaagtgtcaccggcccaggcacctgtcagcctgggtgtgtggcctgctgtggacactctgtctcctgatgaacgggttgacctcttccttctgcagcaagttcttgaaattcaatgaagatcggtgcttcagggtggacatggtccaggccgccctcatcatgggggtcttaaccccagtgatgactctgtccagcctgaccctctttgtctgggtgcggaggagctcccagcagtggcggcggcagcccacacggctgttcgtggtggtcctggcctctgtcctggtgttcctcatctgttccctgcctctgagcatctactggtttgtgctctactggttgagcctgccgcccgagatgcaggtcctgtgcttcagcttgtcacgcctctcctcgtccgtaagcagcagcgccaaccccgtcatctacttcctggtgggcagccggaggagccacaggctgcccaccaggtccctggggactgtgctccaacaggcgcttcgcgaggagcccgagctggaaggtggggagacgcccaccgtgggcaccaatgagatgggggcttga

SEQ ID NO: 42 - protein, 321 aa, Homo sapiens
MNQTLNSSGTVESALNYSRGSTVHTAYLVLSSLAMFTCLCGMAGNSMVIWLLGFRMHRNPFCIYILNLAAADLLFLFSMASTLSLETQPLVNTTDKVHELMKRLMYFAYTVGLSLLTAISTQRCLSVLFPIWFKCHRPRHLSAWVCGLLWTLCLLMNGLTSSFCSKFLKFNEDRCFRVDMVQAALIMGVLTPVMTLSSLTLFVWVRRSSQQWRRQPTRLFVVVLASVLVFLICSLPLSIYWFVLYWLSLPPEMQVLCFSLSRLSSSVSSSANPVIYFLVGSRRSHRLPTRSLGTVLQQALREEPELEGGETPTVGTNEMGA

SEQ ID NO: 43 - DNA, 969 bp, Homo sapiens
  CDS (1)..(969)
atggatccaaccatctcaaccttggacacagaactgacaccaatcaacggaactgaggagactctttgctacaagcagaccttgagcctcacggtgctgacgtgcatcgtttcccttgtcgggctgacaggaaacgcagttgtgctctggctcctgggctgccgcatgcgcaggaacgccttctccatctacatcctcaacttggccgcagcagacttcctcttcctcagcggccgccttatatattccctgttaagcttcatcagtatcccccataccatctctaaaatcctctatcctgtgatgatgttttcctactttgcaggcctgagctttctgagtgccgtgagcaccgagcgctgcctgtccgtcctgtggcccatctggtaccgctgccaccgccccacacacctgtcagcggtggtgtgtgtcctgctctgggccctgtccctgctgcggagcatcctggagtggatgttatgtggcttcctgttcagtggtgctgattctgcttggtgtcaaacatcagatttcatcacagtcgcgtggctgatttttttatgtgtggttctctgtgggtccagcctggtcctgctgatcaggattctctgtggatcccggaagataccgctgaccaggctgtacgtgaccatcctgctcacagtactggtcttcctcctctgtggcctgccctttggcattcagtttttcctatttttatggatccacgtggacagggaagtcttattttgtcatgttcatctagtttctattttcctgtccgctcttaacagcagtgccaaccccatcatttacttcttcgtgggctcctttaggcagcgtcaaaataggcagaacctgaagctggttctccagagggctctgcaggacgcgtctgaggtggatgaaggtggagggcagcttcctgaggaaatcctggagctgtcgggaagcagattggagcagtga

SEQ ID NO: 44 - protein, 322 aa, Homo sapiens
MDPTISTLDTELTPINGTEETLCYKQTLSLTVLTCIVSLVGLTGNAVVLWLLGCRMRRNAFSIYILNLAAADFLFLSGRLIYSLLSFISIPHTISKILYPVMMFSYFAGLSFLSAVSTERCLSVLWPIWYRCHRPTHLSAVVCVLLWALSLLRSILEWMLCGFLFSGADSAWCQTSDFITVAWLIFLCVVLCGSSLVLLIRILCGSRKIPLTRLYVTILLTVLVFLLCGLPFGIQFFLFLWIHVDREVLFCHVHLVSIFLSALNSSANPIIYFFVGSFRQRQNRQNLKLVLQRALQDASEVDEGGGQLPEEILELSGSRLEQ

SEQ ID NO: 45 - DNA, 1191 bp, Homo sapiens
  CDS (1)..(1191)
atgtggaacagctctgacgccaacttctcctgctaccatgagtctgtgctgggctatcgttatgttgcagttagctggggggtggtggtggctgtgacaggcaccgtgggcaatgtgctcaccctactggccttggccatccagcccaagctccgtacccgattcaacctgctcatagccaacctcacactggctgatctcctctactgcacgctccttcagcccttctctgtggacacctacctccacctgcactggcgcaccggtgccaccttctgcagggtatttgggctcctcctttttgcctccaattctgtctccatcctgaccctctgcctcatcgcactgggacgctacctcctcattgcccaccctaagctttttccccaagttttcagtgccaaggggatagtgctggcactggtgagcacctgggttgtgggcgtggccagctttgctcccctctggcctatttatatcctggtacctgtagtctgcacctgcagctttgaccgcatccgaggccggccttacaccaccatcctcatgggcatctactttgtgcttgggctcagcagtgttggcatcttctattgcctcatccaccgccaggtcaaacgagcagcacaggcactggaccaatacaagttgcgacaggcaagcatccactccaaccatgtggccaggactgatgaggccatgcctggtcgtttccaggagctggacagcaggttagcatcaggaggacccagtgaggggatttcatctgagccagtcagtgctgccaccacccagaccctggaaggggactcatcagaagtgggagaccagatcaacagcaagagagctaagcagatggcagagaaaagccctccagaagcatctgccaaagcccagccaattaaaggagccagaagagctccggattcttcatcggaatttgggaaggtgactcgaatgtgttttgctgtgttcctctgctttgccctgagctacatccccttcttgctgctcaacattctggatgccagagtccaggctccccgggtggtccacatgcttgctgccaacctcacctggctcaatggttgcatcaaccctgtgctctatgcagccatgaaccgccaattccgccaagcatatggctccattttaaaaagagggccccggagtttccataggctccattag

SEQ ID NO: 46 - protein, 396 aa, Homo sapiens
MWNSSDANFSCYHESVLGYRYVAVSWGVVVAVTGTVGNVLTLLALAIQPKLRTRFNLLIANLTLADLLYCTLLQPFSVDTYLHLHWRTGATFCRVFGLLLFASNSVSILTLCLIALGRYLLIAHPKLFPQVFSAKGIVLALVSTWVVGVASFAPLWPIYILVPVVCTCSFDRIRGRPYTTILMGIYFVLGLSSVGIFYCLIHRQVKRAAQALDQYKLRQASIHSNHVARTDEAMPGRFQELDSRLASGGPSEGISSEPVSAATTQTLEGDSSEVGDQINSKRAKQMAEKSPPEASAKAQPIKGARRAPDSSSEFGKVTRMCFAVFLCFALSYIPFLLLNILDARVQAPRVVHMLAANLTWLNGCINPVLYAAMNRQFRQAYGSILKRGPRSFHRLH

SEQ ID NO: 47 - DNA, 921 bp, Homo sapiens
  CDS (1)..(921)
atgtattttaaaagtgatgagctagagtttgcaaaaagttttattggaacagtttcaatattttgtctttgtgcaactctgttcacattccttacttttttaattgatgttagaagattcagatacccagagagaccaattatatattactctgtctgttacagcattgtatctcttatgtacttcattggatttttgctaggcgatagcacagcctgcaataaggcagatgagaagctagaacttggtgacactgttgtcctaggctctcaaaataaggcttgcaccgttttgttcatgcttttgtattttttcacaatggctggcactgtgtggtgggtgattcttaccattacttggttcttagctgcaggaagaaaatggagttgtgaagccatcgagcaaaaagcagtgtggtttcatgctgttgcatggggaacaccaggtttcctgactgttatgcttcttgctatgaacaaagttgaaggagacaacattagtggagtttgctttgttggcctttatgacctggatgcttctcgctactttgtactcttgccactgtgcctttgtgtgtttgttgggctctctcttcttttagctggcattatttccttaaatcatgttcgacaagtcatacaacatgatggccggaaccaagaaaaactaaagaaatttatgattcgaattggagtcttcagcggcttgtatcttgtgccattagtgacacttctcggatgttacgtctatgagcaagtgaacaggattacctgggagataacttgggtctctgatcattgtcgtcagtaccatatcccatgtccttatcaggtaaaagctatcacttggattatgtctctatttacatttaatgtagaaaatgtttcatggaaatatacttgtcatggatgtaaaagttga

SEQ ID NO: 48 - protein, 306 aa, Homo sapiens
MYFKSDELEFAKSFIGTVSIFCLCATLFTFLTFLIDVRRFRYPERPIIYYSVCYSIVSLMYFIGFLLGDSTACNKADEKLELGDTVVLGSQNKACTVLFMLLYFFTMAGTVWWVILTITWFLAAGRKWSCEAIEQKAVWFHAVAWGTPGFLTVMLLAMNKVEGDNISGVCFVGLYDLDASRYFVLLPLCLCVFVGLSLLLAGIISLNHVRQVIQHDGRNQEKLKKFMIRIGVFSGLYLVPLVTLLGCYVYEQVNRITWEITWVSDHCRQYHIPCPYQVKAITWIMSLFTFNVENVSWKYTCHGCKS

SEQ ID NO: 49 - DNA, 1257 bp, Homo sapiens
  CDS (1)..(1257)
atgaccctgacatggcctcctcccttccctgcaggttggagcctcccctcttacgtctctgtgcttgtggctctggggaacctgggtctgctggtggtgaccctctggaggaggctggccccaggaaaggacgagcaggtccccatccgggtggtgcaggtgctgggcatggtgggcacagccctgctggcctctctgtggcaccatgtggccccagtggcaggacagttgcattctgtggccttcttagcactggcctttgtgctggcactggcatgctgtgcctcgaatgtcactttcctgcccttcttgagccacctgccacctcgcttcttacggtcattcttcctgggtcaaggcctgagtgccctgctgccctgcgtgctggccctagtgcagggtgtgggccgcctcgagtgcccgccagcccccatcaacggcacccctggccccccgctcgacttccttgagcgttttcccgccagcaccttcttctgggcactgactgcccttctggtcgcttcagctgctgccttccagggtcttctgctgctgttgccgccaccaccatctgtacccacaggggagttaggatcaggcctccaggtgggagccccaggagcagaggaagaggtggaagagtcctcaccactgcaagagccaccaagccaggcagcaggcaccacccctggtccagaccctaaggcctatcagcttctatcagcccgcagtgcctgcctgctgggcctgttggccgccaccaacgcgctgaccaatggcgtgctgcctgccgtgcagagcttttcctgcttaccctacgggcgtctggcctaccacctggctgtggtgctgggcagtgctgccaatcccctggcctgcttcctggccatgggtgtgctgtgcaggtacacaaggacccccagcccctgtgcgggtggaactcagggctgggagccaggtcctggcgcagtcagccctgacattctgctcgctcactgcaggtccttggcagggctgggcggcctctctctgctgggcgtgttctgtgggggctacctgatggcgctggcagtcctgagcccctgcccgcccctggtgggcacctcggcgggggtggtcctcgtggtgagcacagggggacatgaagtggggtgggggggcgttgccctggagcaggcacatctcacgctcagctggtgctgtgtccccctcaggtgctgtcgtgggtgctgtgtcttggcgtgttctcctacgtga

SEQ ID NO: 50 - protein, 418 aa, Homo sapiens
MTLTWPPPFPAGWSLPSYVSVLVALGNLGLLVVTLWRRLAPGKDEQVPIRVVQVLGMVGTALLASLWHHVAPVAGQLHSVAFLALAFVLALACCASNVTFLPFLSHLPPRFLRSFFLGQGLSALLPCVLALVQGVGRLECPPAPINGTPGPPLDFLERFPASTFFWALTALLVASAAAFQGLLLLLPPPPSVPTGELGSGLQVGAPGAEEEVEESSPLQEPPSQAAGTTPGPDPKAYQLLSARSACLLGLLAATNALTNGVLPAVQSFSCLPYGRLAYHLAVVLGSAANPLACFLAMGVLCRYTRTPSPCAGGTQGWEPGPGAVSPDILLAHCRSLAGLGGLSLLGVFCGGYLMALAVLSPCPPLVGTSAGVVLVVSTGGHEVGWGGVALEQAHLTLSWCCVPLRCCRGCCVLACSPT

SEQ ID NO: 51 - DNA, 1098 bp, Homo sapiens
  CDS (1)..(1098)
atgagggctctgggatattcacagtggaaggggacaattggatttctttacagtcaattctctgttcttcgttcaataggtgaaagggagtgtgaacaatgtggtgaagactattggtcaaatgcacaaaagagcgagtgtgtgctgaaagaggtggaataccttgcttatgatgaggccctgggattcacacttgtcattctttctgtctttggggcatttgtggtcttggcagtcacagctgtgtatgtgatacacaggcacactcccctggtgaacgccagtgactggcagctgggctttctcattcaggtttctctgatcatcatgctgctgtcgtccatgcttttcattgacaagccacacaactggtcctgcatggctggccaggtcactctggcactgggcttttctctttgcctgtcttgccttcttggaaagactagttcactgtttttagcctacagaatttccaaatccaaaactcaacttacatccatgcaccccctttatcggaaaatcattgtgctaatctctgttctagcggagattggcatatgtacagcctacttgatattggaacctcccatggtatacaagaacatggaatctcaaaatacaaagatcattctgggatgcaatgaaatttccatagagtttttgtactcgatgtttggaattgatgccttcttagccttgctatgctttcttacaacttttgtggctcgccagttaccagataattactatgaaggaaaatgcatcacctttgggatgcttgtctttttcatcatttggatgtcttttgtccctgtttatttgagcaccaaaggcaagttcaaaatggctgtggaaatatttgcaatcttggcatccagccatggcttgttgggttgtatatttgctcctaagtgcctcattattttgctgaggccagagaggaacaccagtgaaattgtttgtggaagagtctccaccacagataattgcatccaactgacctcagcttttgtgagcagtgagcttaacaataccacagtgtcaactgttctggatgacagagttttgatttacatgtgtcctttgaagctgcaatga

SEQ ID NO: 52 - protein, 365 aa, Homo sapiens
MRALGYSQWKGTIGFLYSQFSVLRSIGERECEQCGEDYWSNAQKSECVLKEVEYLAYDEALGFTLVILSVFGAFVVLAVTAVYVIHRHTPLVNASDWQLGFLIQVSLIIMLLSSMLFIDKPHNWSCMAGQVTLALGFSLCLSCLLGKTSSLFLAYRISKSKTQLTSMHPLYRKIIVLISVLAEIGICTAYLILEPPMVYKNMESQNTKIILGCNEISIEFLYSMFGIDAFLALLCFLTTFVARQLPDNYYEGKCITFGMLVFFIIWMSFVPVYLSTKGKFKMAVEIFAILASSHGLLGCIFAPKCLIILLRPERNTSEIVCGRVSTTDNCIQLTSAFVSSELNNTTVSTVLDDRVLIYMCPLKLQ

SEQ ID NO: 53 - DNA, 885 bp, Homo sapiens
  CDS (1)..(885)
  modified_base (5): a, t, c, g, other or unknown
  modified_base (21): a, t, c, g, other or unknown
  modified_base (249): a, t, c, g, other or unknown
  modified_base (303)..(305): a, t, c, g, other or unknown
  modified_base (326): a, t, c, g, other or unknown
  modified_base (369): a, t, c, g, other or unknown
  modified_base (534): a, t, c, g, other or unknown
  modified_base (539): a, t, c, g, other or unknown
  modified_base (630): a, t, c, g, other or unknown
  modified_base (728): a, t, c, g, other or unknown
atgancctggtcggctctagnagatccccagtaattagccagttcagtctttctgttactcgtaaactctctccctgttggctgcactgcatcagtaagcagagggctgtgtggcatgtcaaagctaatgaggagggctgcctgctgggtaagaatgttgttggtggcagagccgttttgtgctctgctgttgagaatgccgggtacattcacaagacgtttcctgcgtgtggtgggaactgctctcangcaccaatttcatattgtgtcctatcagtgggtttctgtctcttcgttctgtcnnnctcgcggtcttcccgttggtnaagtcctatttacttttgtgtcggtgtgttcgcgttggtgtcngttccgtttctcgtggtgtgtggtctcgccctgggttgtgggggcttccttctgctgttcgtgtgctggtgcggtcgtccgtgtcttcctgtggtcgctgggagttggggtcccctggggtcctttttttgggccgagcctccctccttttgccagtgctcttgnggtgngttttttcctttgggctttgtgggtccctggtgtggtgcgttgtggtgcccgtcttccttctcctggttgctctgcgccgccctgcggtgntgttctctgtctgtcctcgtgccttgcttttggcttcttgtcgtcggccgctcgcttttgtcgcttgtcctttgctcccccgttcctccgttgctttnttggttctttttttcgcggcctgtccgtcgtcgctcttcctcttgtttttggtttcgttccgggtgttgtttccgcgctcggtccttcgcgcttttcttttttcgtctttgttcgtggtgtcgtgctctagtgggctgtacagtcttgtatatataa

SEQ ID NO: 54 - protein, 294 aa, Homo sapiens
  MOD_RES (2): Variable amino acid
  MOD_RES (7): Variable amino acid
  MOD_RES (101)..(102): Variable amino acid
  MOD_RES (109): Variable amino acid
  MOD_RES (123): Variable amino acid
  MOD_RES (178): Variable amino acid
  MOD_RES (180): Variable amino acid
  MOD_RES (210): Variable amino acid
  MOD_RES (243): Variable amino acid
MXLVGSXRSPVISQFSLSVTRKLSPCWLHCISKQRAVWHVKANEEGCLLGKNVVGGRAVLCSAVENAGYIHKTFPACGGNCSTAPISYCVLSVGFCLFVLXXSRSSRWXSPIYFCVGVFALVXVPFLVVCGLALGCGGFLLLFVCWCGRPCLPVVAGSWGPLGSFFWAEPPSFCQCSXGXFFPLGFVGPWCGALWCPSSFSWLLCAALRXCSLSVLVPCFWLLVVGRSLLSLVLCSPVPPLLXWFFFSRPVRRRSSSCFWFRSGCCFRARSFALFFFRLCSWCRALVGCTVLYI

SEQ ID NO: 55 - DNA, 903 bp, Homo sapiens
  CDS (1)..(903)
  modified_base (203): a, t, c, g, other or unknown
  modified_base (247): a, t, c, g, other or unknown
  modified_base (284): a, t, c, g, other or unknown
  modified_base (630): a, t, c, g, other or unknown
  modified_base (757): a, t, c, g, other or unknown
  modified_base (779): a, t, c, g, other or unknown
  modified_base (829): a, t, c, g, other or unknown
  modified_base (835): a, t, c, g, other or unknown
atgaaaagtgcttgcacagcaacaagcacacggcctggggtgtggctgcgaggtgggagcagggaccctcaccatcagcactgcaaagtaggtcaagtggttgcagaagcaggatgtttgggtttctctcctgacgggctcacacccagcactgctccaatgccccgggctgctcactgtggaggggacagcgcggggctccnatctcgtccagtcctcctggacccctctgtgtcctccccctttngctcgactgtgtcattcttcctcccggccctcctctngcctgccgtcgctctctcttcgaggtgctcctttctcctggctgccctctgtgtttttcctcgcctcttcccccccgctggtctctctttctcttcccccttctcgttctggccttttgctcctgctttctttcctgtgtggtcttcgtcccccgccccctcctttgcgtcttcctctctttctgctgtggccctcttcgctgtgttggttcgtttgccgcgctggctgtgcttccccttttcccgcttgttgttcttcttctttcgtccggtctgcggtgcgctctctctcgtttgcgtcctctcctggtcctcgcttcgtttccttcgtccgtctttccccccncggttgtggttggtggctgccggtcccggcggtgcgtggtgcgcgggttggcgtgcgctgtgttctgttccttttgtgcgttgtgcttgcggcgtgtgtgtgtgcggcgcgtttttgttttgtttgncgcgccctgtccttcgtcctgngtgtttggtttcctttttcgtcaagaataaaataagagacaaaacgctanagcttngcagccctcgccgtgcggctctagtagataactatgtctgtcccttccccaggataaactggcgttga

SEQ ID NO: 56 - protein, 300 aa, Homo sapiens
  MOD_RES (68): Variable amino acid
  MOD_RES (83): Variable amino acid
  MOD_RES (95): Variable amino acid
  MOD_RES (253): Variable amino acid
  MOD_RES (260): Variable amino acid
  MOD_RES (277): Variable amino acid
  MOD_RES (279): Variable amino acid
MKSACTATSTRPGVWLRGGSRDPHHQHCKVGQVVAEAGCLGFSPDGLTPSTAPMPRAAHCGGDSAGLXSRPVLLDPSVSSPFXSTVSFFLPALLXPAVALSSRCSFLLAALCVFPRLFPPAGLSFSSPFSFWPFAPAFFPVWSSSPAPSFASSSLSAVALFAVLVRLPRWLCFPFSRLLFFFFRPVCGALSLVCVLSWSSLRFLRPSFPPRLWLVAAGPGGAWCAGWRALCSVPFVRCACGVCVCGAFLFCLXRPVLRPXCLVSFFVKNKIRDKTLXLXSPRRAALVDNYVCPFPRINWR

SEQ ID NO: 57 - DNA, 1041 bp, Homo sapiens
  CDS (1)..(1041)
atggagagaaaatttatgtccttgcaaccatccatctccgtatcagaaatggaaccaaatggcaccttcagcaataacaacagcaggaactgcacaattgaaaacttcaagagagaatttttcccaattgtatatctgataatatttttctggggagtcttgggaaatgggttgtccatatatgttttcctgcagccttataagaagtccacatctgtgaacgttttcatgctaaatctggccatttcagatctcctgttcataagcacgcttcccttcagggctgactattatcttagaggctccaattggatatttggagacctggcctgcaggattatgtcttattccttgtatgtcaacatgtacagcagtatttatttcctgaccgtgctgagtgttgtgcgtttcctggcaatggttcacccctttcggcttctgcatgtcaccagcatcaggagtgcctggatcctctgtgggatcatatggatccttatcatggcttcctcaataatgctcctggacagtggctctgagcagaacggcagtgtcacatcatgcttagagctgaatctctataaaattgctaagctgcagaccatgaactatattgccttggtggtgggctgcctgctgccatttttcacactcagcatctgttatctgctgatcattcgggttctgttaaaagtggaggtcccagaatcggggctgcgggtttctcacaggaaggcactgaccaccatcatcatcaccttgatcatcttcttcttgtgtttcctgccctatcacacactgaggaccgtccacttgacgacatggaaagtgggtttatgcaaagacagactgcataaagctttggttatcacactggccttggcagcagccaatgcctgcttcaatcctctgctctattactttgctggggagaattttaaggacagactaaagtctgcactcagaaaaggccatccacagaaggcaaagacaaagtgtgttttccctgttagtgtgtggttgagaaaggaaacaagagtataa

SEQ ID NO: 58 - protein, 346 aa, Homo sapiens
MERKFMSLQPSISVSEMEPNGTFSNNNSRNCTIENFKREFFPIVYLIIFFWGVLGNGLSIYVFLQPYKKSTSVNVFMLNLAISDLLFISTLPFRADYYLRGSNWIFGDLACRIMSYSLYVNMYSSIYFLTVLSVVRFLAMVHPFRLLHVTSIRSAWILCGIIWILIMASSIMLLDSGSEQNGSVTSCLELNLYKIAKLQTMNYIALVVGCLLPFFTLSICYLLIIRVLLKVEVPESGLRVSHRKALTTIIITLIIFFLCFLPYHTLRTVHLTTWKVGLCKDRLHKALVITLALAAANACFNPLLYYFAGENFKDRLKSALRKGHPQKAKTKCVFPVSVWLRKETRV

SEQ ID NO: 59 - DNA, 1107 bp, Homo sapiens
  CDS (1)..(1107)
atggccaactccacagggctgaacgcctcagaagtcgcaggctcgttggggttgatcctggcagctgtcgtggaggtgggggcactgctgggcaacggcgcgctgctggtcgtggtgctgcgcacgccgggactgcgcgacgcgctctacctggcgcacctgtgcgtcgtggacctgctggcggccgcctccatcatgccgctgggcctgctggccgcaccgccgcccgggctgggccgcgtgcgcctgggccccgcgccatgccgcgccgctcgcttcctctccgccgctctgctgccggcctgcacgctcggggtggccgcacttggcctggcacgctaccgcctcatcgtgcacccgctgcggccaggctcgcggccgccgcctgtgctcgtgctcaccgccgtgtgggccgcggcgggactgctgggcgcgctctccctgctcggcccgccgcccgcaccgccccctgctcctgctcgctgctcggtcctggctgggggcctcgggcccttccggccgctctgggccctgctggccttcgcgctgcccgccctcctgctgctcggcgcctacggcggcatcttcgtggtggcgcgtcgcgctgccctgaggcccccacggccggcgcgcgggtcccgactccgctcggactctctggatagccgcctttccatcttgccgccgctccggcctcgcctgcccgggggcaaggcggccctggccccagcgctggccgtgggccaatttgcagcctgctggctgccttatggctgcgcgtgcctggcgcccgcagcgcgggccgcggaagccgaagcggctgtcacctgggtcgcctactcggccttcgcggctcaccccttcctgtacgggctgctgcagcgccccgtgcgcttggcactgggccgcctctctcgccgtgcactgcctggacctgtgcgggcctgcactccgcaagcctggcacccgcgggcactcttgcaatgcctccagagacccccagagggccctgccgtaggcccttctgaggctccagaacagacccccgagttggcaggagggcggagccccgcataccaggggccacctgagagttctctctcctga

SEQ ID NO: 60 - protein, 368 aa, Homo sapiens
MANSTGLNASEVAGSLGLILAAVVEVGALLGNGALLVVVLRTPGLRDALYLAHLCVVDLLAAASIMPLGLLAAPPPGLGRVRLGPAPCRAARFLSAALLPACTLGVAALGLARYRLIVHPLRPGSRPPPVLVLTAVWAAAGLLGALSLLGPPPAPPPAPARCSVLAGGLGPFRPLWALLAFALPALLLLGAYGGIFVVARRAALRPPRPARGSRLRSDSLDSRLSILPPLRPRLPGGKAALAPALAVGQFAACWLPYGCACLAPAARAAEAEAAVTWVAYSAFAAHPFLYGLLQRPVRLALGRLSRRALPGPVRACTPQAWHPRALLQCLQRPPEGPAVGPSEAPEQTPELAGGRSPAYQGPPESSLS

SEQ ID NO: 61 - DNA, 702 bp, Homo sapiens
  CDS (1)..(702)
atggagcccaatgctacgttcaccacgcagctcacggccacacctgagcgactgctccgactcatctctgctggggtctgtggcctcatcctgctggtggggctgtcagctaatgggctcatgctgctggtggtgggccggggcccgggctccccccacccgctccactccctgacccacagcctcatgatgaacatcacgccatctgacctgctcttcctggcctgcgtggtgcctgtgctgctgctgagcttcctgcagcacaactggtggctgggccctgccatctgcaccattagccaggccaccaacacagccaccacgttctgcatcttctatagcatggtggccacagctctcctgcgccatgtggctgtggcccggcctgacctggccttcccagccggctggggcaccctcttgctgctctgtggggccatgtgggccctgggccttacagaatccctgcccaactggctgttccagagggtggcagtggaggaggagacagcgggggctcccaagacccaggcctgcctcttgctcctgagccctgctgggacctcctgctacatcagcctgctgggagccctggccttcctgccatgcacgctggggctgggctgctctttcagccacgtgggctggctcctgtggacccagccccaaggtcccatgggagagagcatccaggagcattaa

SEQ ID NO: 62 - protein, 233 aa, Homo sapiens
MEPNATFTTQLTATPERLLRLISAGVCGLILLVGLSANGLMLLVVGRGPGSPHPLHSLTHSLMMNITPSDLLFLACVVPVLLLSFLQHNWWLGPAICTISQATNTATTFCIFYSMVATALLRHVAVARPDLAFPAGWGTLLLLCGAMWALGLTESLPNWLFQRVAVEEETAGAPKTQACLLLLSPAGTSCYISLLGALAFLPCTLGLGCSFSHVGWLLWTQPQGPMGESIQEH

SEQ ID NO: 63 - DNA, 1188 bp, Homo sapiens
  CDS (1)..(1188)
atgactcacactctttaccctaccccttttgctttgtatccaataaatatcagcgcagcctggcatttggggccactaccagtctcctgctttgtatccaataaatatcagcgcagcctggcattcggggccactaccggtctccgcgtcttggtggtagtggtcccccagacacagctgtcttttctttcatctctttgtcttgtgtctttatttctacactctcttgtctctgcacacggagagaaacccaccaaacctgtggggctggaccctacactattccaggtagttgttggaatcctggggaatttttcactcttatattattatatgttcctttactttaggggatacaagccaagatccacagatttgattctcaggcacctgactgtagctgactccttggttatcctatctaaaagaatcccagagaccatggcaacttttgggttgaaacattttgacaattattttggatgcaaatttcttttgtatgcacacagggtaggcaggggtgtgtccattggaagcacctgcctcttgagtgtcttccaggtgatcaccatcaaccctaggaactccaggtgggcagagatgaaagtaaaagccccgacatacattggtctctccaatatcctgtgctgggccttccacatgctggtaaatgccatttttcctatttatacaactggcaaatggagcaacaacaacatcacaaagaaaggagatttgggatattgttctgccccacttagtgatgaagtcacaaagtcagtatatgcagcattgacatccttccatgatgttttgtgtctggggctcatgctctgggccagcagctccatcgttttggtcttgtacaggcacaaacagcaggtacaacacatctgtaggaacaatctctaccccaactcttctcctgggaacagagccatccaaagcatccttgcattggtgagcacctttgcattatgttacgccctttccttcatcacctacgtttatttagctctcttcgataattccagttggtggctagtgaacactgctgcactaatcattgcctgttttccaactattagcccttttgttctcatgtgccgtgaccccagcagatccaggctctgcagtatctgctgcagaagaaatagacgattctttcatgatttcaggaaaatgtga

SEQ ID NO: 64 - protein, 395 aa, Homo sapiens
MTHTLYPTPFALYPINISAAWHLGPLPVSCFVSNKYQRSLAFGATTGLRVLVVVVPQTQLSFLSSLCLVSLFLHSLVSAHGEKPTKPVGLDPTLFQVVVGILGNFSLLYYYMFLYFRGYKPRSTDLILRHLTVADSLVILSKRIPETMATFGLKHFDNYFGCKFLLYAHRVGRGVSIGSTCLLSVFQVITINPRNSRWAEMKVKAPTYIGLSNILCWAFHMLVNAIFPIYTTGKWSNNNITKKGDLGYCSAPLSDEVTKSVYAALTSFHDVLCLGLMLWASSSIVLVLYRHKQQVQHICRNNLYPNSSPGNRAIQSILALVSTFALCYALSFITYVYLALFDNSSWWLVNTAALIIACFPTISPFVLMCRDPSRSRLCSICCRRNRRFFHDFRKM

SEQ ID NO: 65 - DNA, 1173 bp, Homo sapiens
  CDS (1)..(1173)
  modified_base (1071)..(1170): a, t, c, g, other or unknown
atgcgttctatgttctggtgtattgagaggagggttagggttcaccccacttgcagctcttcggaagaagagtcgtgtatgtcccacagctgggagttctctaaggtgagagaacctccaacttggagttctctggggccagaaacagggtcagcctcccttagactgggagttttccgagggcaagggccatgttcatctcttttgattggaaattctctgaatacagaggctgaccttggtcctgaagacctggtcccaccatcctctggcccagggttaatgtctgatctctctacaggccccttcaagccctgtgagtacctctttgaaagctggggcatccgcctggccgtgtgggccatcgtgttgctctccgtgctctgcaatggactggtgctgctgaccgtgttcgctggcgggcctgtccccctgcccccggtcaagtttgtggtaggtgcgattgcaggcgccaacaccttgactggcatttcctgtggccttctagcctcagtcgatgccctgacctttggtcagttctctgagtacggagcccgctgggagacggggctaggctgccgggccactggcttcctggcagtacttgggtcggaggcatcggtgctgctgctcactctggccgcagtgcagtgcagcgtctccgtctcctgtgtccgggcctatgggaagtccccctccctgggcagcgttcgagcaggggtcctaggctgcctggcactggcagggctggccgccgcgctgcccctggcctcagtgggagaatacggggcctccccactctgcctgccctacgcgccacctgagggtcagccagcagccctgggattcaccgtggccctggtgatgatgaactcattctgttttctggttgtggccggtgcctacatcaaagagtattgtgacatgacgcgggccgactttgaggccgtgtgggactgcgccatggtcaggcaagtgacctggctcatcttcgcaatcgggctcctccagtgtacggtgacaatccccagctctgcctccatggttggcctctcccctatcacgccggannnnnnnnnnnnnnnnnnnnnnnnnnnnnnnnnnnnnnnnnnnnnnnnnnnnnnnnnnnnnnnnnnnnnnnnnnnnnnnnnnnnnnnnnnnnnnnnnnnntga

SEQ ID NO: 66 - protein, 390 aa, Homo sapiens
  MOD_RES (357)..(390): Variable amino acid
MRSMFWCIERRVRVHPTCSSSEEESCMSHSWEFSKVREPPTWSSLGPETGSASLRLGVFRGQGPCSSLLIGNSLNTEADLGPEDLVPPSSGPGLMSDLSTGPFKPCEYLFESWGIRLAVWAIVLLSVLCNGLVLLTVFAGGPVPLPPVKFVVGAIAGANTLTGISCGLLASVDALTFGQFSEYGARWETGLGCRATGFLAVLGSEASVLLLTLAAVQCSVSVSCVRAYGKSPSLGSVRAGVLGCLALAGLAAALPLASVGEYGASPLCLPYAPPEGQPAALGFTVALVMMNSFCFLVVAGAYIKEYCDMTRADFEAVWDCAMVRQVTWLIFAIGLLQCTVTIPSSASMVGLSPITPXXXXXXXXXXXXXXXXXXXXXXXXXXXXXXXXXX

SEQ ID NO: 67 - DNA, 1425 bp, Homo sapiens
  CDS (1)..(1425)
atgtcttccgcccccctccacctccctccctctcttacacacacatttgcccccgccgatgtcgcttctcgcacgggtgcacctgtgtgtgtgccccggatgtactcatatcttgttctccttcgcttcgtgttgtacttggggtttcacgttcattggccagcacttcgtaacggccgtgtagctgtgttctcacccccttcctttcctctccgccgaattctgccgccttttcggagcgtcttttcttcaccccctccgcacgcgtgcaccctcgacgtgcatgtctccgtctccgtgtgtgtatgtatgcttgctgccgtatacctttttctctcttgcctgcacgtactcatcgtcacgcgcctggagcgaaccgccagaggcacatctgcaaaataccgaacaaaaacgaaaagataccagcagtacaagccgtgcgcttatagatggtgcacgaggaggcgagcggtgggcgggcgaggaggtgcgtgtggttgttgttgcctctcgcctcctgctgttgtttccatactcttctcattctcgcctgccctactctcctcgcccgccacgaccgcggggcttgagtgttgccacaaaccgcaggggacgctttcctccctgcttctgtctcaccacgggcgtaccgcgccgcggtttcttgtcacgtggctggacatccgcagcgcgcatacaacggctcggggagagagtgacatgctctataccgcccggctacatatatgtgcgcttcacgggtggagtctctcgccaagtcctccccatctactgatgcatacctctctctctctttgtgtgtgtgtgtgtgtgtgtgtgtctcatgtgtcacacgggaacgccccaatgtggcgtgggggcatcatcactttctcctgcctcctcctcttgcgcctcgcgatcgatggaaggcaaatagaaacgcgtgttttctcctcttggcgcgcggtgtgcaaccgaagaagagcacgtccgtacgccctcctcgcgtctgctcactccgagacgctcacgcgtgcgtgtttgatctaccgtcgcagcactgtacgtgggcgtttctgtctttcccttttttttcgttgttccgcttggctcaccatgcatcgcagttttgtgcgctgcagctccattttccactccaaaggagcggccgatgaatggttcggccgcactacctccgcgaccacatggcgaggcgccttcacctcctttgccttgtgcctgctcggcattgccgtcattaaccagttctgccgcggcaaccccatggggcggtgcgagtacgaaaacgagatcgtgatgccgctgcagcgaacctggttgccgccgccggacacccacggatttgtcgatgctgagtcggaggagggaaggcagaagccgccgcctgtacctcgacgttga

SEQ ID NO: 68 - protein, 474 aa, Homo sapiens
MSSAPLHLPPSLTHTFAPADVASRTGAPVCVPRMYSYLVLLRFVLYLGFHVHWPALRNGRVAVFSPPSFPLRRILPPFRSVFSSPPPHACTLDVHVSVSVCVCMLAAVYLFLSCLHVLIVTRLERTARGTSAKYRTKTKRYQQYKPCAYRWCTRRRAVGGRGGACGCCCLSPPAVVSILFSFSPALLSSPATTAGLECCHKPQGTLSSLLLSHHGRTAPRFLVTWLDIRSAHTTARGESDMLYTARLHICALHGWSLSPSPPHLLMHTSLSLCVCVCVCVSHVSHGNAPMWRGGIITFSCLLLLRLAIDGRQIETRVFSSWRAVCNRRRARPYALLASAHSETLTRACLIYRRSTVRGRFCLSLFFRCSAWLTMHRSFVRCSSIFHSKGAADEWFGRTTSATTWRGAFTSFALCLLGIAVINQFCRGNPMGRCEYENEIVMPLQRTWLPPPDTHGFVDAESEEGRQKPPPVPRR

SEQ ID NO: 69 - DNA, 1074 bp, Homo sapiens
  CDS (1)..(1074)
atgttgaaattggttattattgagaacatggcagaaattatgctattctcattagatctcttgcttttctccacagatatcctttgctttaattttccttctaagatgatcaaacttcctggttttattaccatacaaatcttcttttatccacaagccagctttggaatttcagcaaacaccatccttcttctttaccacatcttcacctttgttttcagtcacaggtctaagtccattgacatgataattagtcacctgtctctcatccacatactgctgctcttcactcaggcaatattggtgtccttagacttctttggttcacagaatactcaggatgatcttaggtataaggtcattgtctttttaaacaaggtgatgaggggcctctccatctgcaccccctgcctcctgagtgtgctccaggccatcatcagccccagcatcttctccttggcaaagctcaaacatccttctgcaagtcacatcttaggattcttccttttctcatgggtcctcaacatgttcattggtgtaatcttctgctgtacactgcggctacccccagtgaaacggggccagtcttctgtttgtcatacagcactgttcctttttgcccatgagctacacccacaggagactgtttttcacactaatgactttgagggatgtcacctttatagggttcatggtcctctcaagaggctacatggtgattattttatacagacaataagaggctatctcagtgccttcacacagccagcctgtccccgagtctcaccagtgaaaagagcctcccaggctatcttactgctggtgagttttgtcttcacatactgggtggactttacgttctcattttcaggaggtgtgacatggataaatgattctctgctagtgtggctccaggttattgtggccaatagctatgccgcaattagtcctttgatgctaatttatgctgataaccaaatattcaagactctgcaaatgttatggtttaaatatttgtctcctccaaagctcatgttgaaatttaatcgccaatgtggcagtactaagaagtga

SEQ ID NO: 70 - protein, 357 aa, Homo sapiens [sequence omitted]

SEQ ID NO: 71 - DNA, 627 bp, Homo sapiens
  CDS (1)..(627)
atggaaatgaccaagcttttcagctatattgtcattaaaaatgtttattaccctcaagtcagctttggaatctcagcaaacaccttcctccttcttttccacatcttcacttttgcttatactcacaggcttaagcccattgacatgaccattagtcacttgcccctaatccacatactgctactcttcactcaggcgatactggtgtcctccgacttatttgaatcatggaatattcagaacaatgatctaaagtgtaagatcatcacatttttaaacagggtgatgaggggagtctccatctgcaccacttgcctcctaagcgtgctccaggccatcaccatcagccccagcacctccttcttggaaaagtttaaacatatttctgcaaatcacaccttaggcttcatcctcttctcatgggtcctcaacatgttcattactaataaccttttgcttttcattgtgcctaccccgaataggattggggccagtcttttgtttgtcactgagcactgttatgttttgcccatgagctacacccacaggagcctgtttttcatactaatggttttgagggatgtcatcttcataggactcatggtcctctcaagtggctatgggtga

SEQ ID NO: 72 - protein, 208 aa, Homo sapiens
MEMTKLFSYIVIKNVYYPQVSFGISANTFLLLFHIFTFAYTHRLKPIDMTISHLPLIHILLLFTQAILVSSDLFESWNIQNNDLKCKIITFLNRVMRGVSICTTCLLSVLQAITISPSTSFLEKFKHISANHTLGFILFSWVLNMFITNNLLLFIVPTPNRIGASLLFVTEHCYVLPMSYTHRSLFFILMVLRDVIFIGLMVLSSGYG

SEQ ID NO: 73 - DNA, 993 bp, Homo sapiens
  CDS (1)..(993)
atgacgcccaacagcactggcgaggtgcccagccccattcccaagggggctttggggctctccctggccctggcaagcctcatcatcaccgcgaacctgctcctagccctgggcatcgcctgggaccgccgcctgcgcagcccacctgctggctgcttcttcctgagcctactgctggctgggctgctcacgggtctggcattgcccacattgccagggctgtggaaccagagtcgccggggttactggtcctgcctcctcgtctacttggctcccaacttctccttcctctccctgcttgccaacctcttgctggtgcacggggagcgctacatggcagtcctgaggccactccagccccctgggagcattcggctggccctgctcctcacctgggctggtcccctgctctttgccagtctgcccgctctggggtggaaccactggacccctggtgccaactgcagctcccaggctatcttcccagccccctacctgtacctcgaagtctatgggctcctgctgcccgccgtgggtgctgctgccttcctctctgtccgcgtgctggccactgcccaccgccagctgcaggacatctgccggctggagcgggcagtgtgccgcgatgagccctccgccctggcccgggcccttacctggaggcaggcaagggcacaggctggagccatgctgctcttcgggctgtgctgggggccctacgtggccacactgctcctctcagtcctggcctatgagcagcgcccgccactggggcctgggacactgttgtccctcctctccctaggaagtgccagtgcagcggcagtgcccgtagccatggggctgggcgatcagcgctacacagccccctggagggcagccgcccaaaggtgcctgcaggggctgtggggaagagcctcccgggacagtcccggccccagcattgcctaccacccaagcagccaaagcagtgtcgacctggacttgaactaa

SEQ ID NO: 74 - protein, 330 aa, Homo sapiens
MTPNSTGEVPSPIPKGALGLSLALASLIITANLLLALGIAWDRRLRSPPAGCFFLSLLLAGLLTGLALPTLPGLWNQSRRGYWSCLLVYLAPNFSFLSLLANLLLVHGERYMAVLRPLQPPGSIRLALLLTWAGPLLFASLPALGWNHWTPGANCSSQAIFPAPYLYLEVYGLLLPAVGAAAFLSVRVLATAHRQLQDICRLERAVCRDEPSALARALTWRQARAQAGAMLLFGLCWGPYVATLLLSVLAYEQRPPLGPGTLLSLLSLGSASAAAVPVAMGLGDQRYTAPWRAAAQRCLQGLWGRASRDSPGPSIAYHPSSQSSVDLDLN

SEQ ID NO: 75 - DNA, 1002 bp, Homo sapiens
  CDS (1)..(1002)
atgcctgctaattacacgtgtaccaggccagatggagacaatacagattttcgatactttatttatgcagtgacatacactgtcattcttgtgccaggtctcatagggaatatattagccctgtgggtattctatggttatatgaaagaaacaaaacgagctgtgatatttatgataaacttagccattgctgacttactacaagttctttccttgccactgaggatcttctactacttgaatcatgactggccatttgggcctggtctctgcatgttctgtttctacctgaagtatgtcaacatgtatgcaagcatctacttcttggtctgcatcagtgtgcgacgattttggtttctcatgtacccctttcgcttccatgactgcaaacagaaatatgacctgtacatcagcattgctggctggctgatcatctgccttgcctgtgtactctttccactcctcagaaccagtgatgatacctctggcaataggaccaaatgctttgtggatcttcctaccaggaatgtcaacctggcccagtccgttgttatgatgaccattggcgagttgattgggtttgtaactccgcttctgattgtcctatattgtacctggaagacggttttatcactgcaagataaatatcccatggcccaagatcttggagagaaacagaaagccttgaagatgattctaacctgtgcaggggtattcctaatttgctttgcaccttatcatttcagttttcctttagatttcctggtgaagtccaatgaaattaaaagctgcctagccagaagggtgattctaatatttcattctgtggcattgtgtcttgctagtctgaattcatgtcttgacccagtcatatactacttttccactaatgagttccgaagacggctttcaagacaagatttgcatgacagcatccaactccatgcaaaatcctttgtgagtaaccatacagcttccaccatgacacctgaattatgctaa

SEQ ID NO: 76 - protein, 333 aa, Homo sapiens
MPANYTCTRPDGDNTDFRYFIYAVTYTVILVPGLIGNILALWVFYGYMKETKRAVIFMINLAIADLLQVLSLPLRIFYYLNHDWPFGPGLCMFCFYLKYVNMYASIYFLVCISVRRFWFLMYPFRFHDCKQKYDLYISIAGWLIICLACVLFPLLRTSDDTSGNRTKCFVDLPTRNVNLAQSVVMMTIGELIGFVTPLLIVLYCTWKTVLSLQDKYPMAQDLGEKQKALKMILTCAGVFLICFAPYHFSFPLDFLVKSNEIKSCLARRVILIFHSVALCLASLNSCLDPVIYYFSTNEFRRRLSRQDLHDSIQLHAKSFVSNHTASTMTPELC

SEQ ID NO: 77 - DNA, 1002 bp, Homo sapiens
  CDS (1)..(1002)
atgaacaccacagtgatgcaaggcttcaacagatctgagcggtgccccagagacactcggatagtacagctggtattcccagccctctacacagtggttttcttgaccggcatcctgctgaatactttggctctgtgggtgtttgttcacatccccagctcctccaccttcatcatctacctcaaaaacactttggtggccgacttgataatgacactcatgcttcctttcaaaatcctctctgactcacacctggcaccctggcagctcagagcttttgtgtgtcgtttttcttcggtgatattttatgagaccatgtatgtgggcatcgtgctgttagggctcatagcctttgacagattcctcaagatcatcagacctttgagaaatatttttctaaaaaaacctgtttttgcaaaaacggtctcaatcttcatctggttctttttgttcttcatctccctgccaaatacgatcttgagcaacaaggaagcaacaccatcgtctgtgaaaaagtgtgcttccttaaaggggcctctggggctgaaatggcatcaaatggtaaataacatatgccagtttattttctggactgtttttatcctaatgcttgtgttttatgtggttattgcaaaaaaagtatatgattcttatagaaagtccaaaagtaaggacagaaaaaacaacaaaaagctggaaggcaaagtatttgttgtcgtggctgtcttctttgtgtgttttgctccatttcattttgccagagttccatatactcacagtcaaaccaacaataagactgactgtagactgcaaaatcaactgtttattgctaaagaaacaactctctttttggcagcaactaacatttgtatggatcccttaatatacatattcttatgtaaaaaattcacagaaaagctaccatgtatgcaagggagaaagaccacagcatcaagccaagaaaatcatagcagtcagacagacaacataaccttaggctga

SEQ ID NO: 78 - protein, 333 aa, Homo sapiens
MNTTVMQGFNRSERCPRDTRIVQLVFPALYTVVFLTGILLNTLALWVFVHIPSSSTFIIYLKNTLVADLIMTLMLPFKILSDSHLAPWQLRAFVCRFSSVIFYETMYVGIVLLGLIAFDRFLKIIRPLRNIFLKKPVFAKTVSIFIWFFLFFISLPNTILSNKEATPSSVKKCASLKGPLGLKWHQMVNNICQFIFWTVFILMLVFYVVIAKKVYDSYRKSKSKDRKNNKKLEGKVFVVVAVFFVCFAPFHFARVPYTHSQTNNKTDCRLQNQLFIAKETTLFLAATNICMDPLIYIFLCKKFTEKLPCMQGRKTTASSQENHSSQTDNITLG

SEQ ID NO: 79 - DNA, 1539 bp, Homo sapiens
  CDS (1)..(1539)
atgtggttcgtgactgagccaattctctgggcatttttcctattcttaatgctaatgactatccactgctggtcctcttatctgtttactcaaaaacacaaactgactctcatccttgtgtttcaggatgtcatcagtatagctgacaatatccttaattcagcctcagtaaccaactggacagtcttactgcgggaagaaaagtatgccagctcacggttactagagacattagaaaacatcagcactctggtgcctccgacagctcttcctctgaatttttctcggaaattcattgactggaaagggattccagtgaacaaaagccaactcaaaaggggttacagctatcagattaaaatgtgtccccaaaatacatctattcccatcagaggccgtgtgttaattgggtcagaccaattccagagatcccttccagaaactattatcagcatggcctcgttgactctggggaacattctacccgtttccaaaaatggaaatgctcaggtcaatggacctgtgatatccacggttattcaaaactattccataaatgaagttttcctatttttttccaagatagagtcaaacctgagccagcctcattgtgtgttttgggatttcagtcatttgcagtggaacgatgcaggctgccacctagtgaatgaaactcaagacatcgtgacgtgccaatgtactcacttgacctccttctccatgttgatgtcaccttttgtcccctctacaatcttccccgttgtaaaatggatcacctatgtgggactgggtatctccattggaagtctcattttatgcctgatcatcgaggctttgttttggaagcagattaaaaaaagccaaacctctcacacacgtcgtatttgcatggtgaacatagccctgtccctcttgattgctgatgtctggtttattgttggtgccacagtggacaccacggtgaacccttctggagtctgcacagctgctgtgttctttacacacttcttctacctctctttgttcttctggatgctcatgcttggcatcctgctggcttaccggatcatcctcgtgttccatcacatggcccagcatttgatgatggctgttggattttgcctgggttatgggtgccctctcattatatctgtcattaccattgctgtcacgcaacctagcaatacctacaaaaggaaagatgtgtgttggcttaactggtccaatggaagcaaaccactcctggcttttgttgtccctgcactggctattgtggctgtgaacttcgttgtggtgctgctagttctcacaaagctctggaggccgactgttggggaaagactgagtcgggatgacaaggccaccatcgtccgcgtggggaagagcctcctcattctgacccctctgctagggctcacctggggctttggaataggaacaatagtggacagccagaatctggcttggcatgttatttttgctttactcaatgcattccaggtgagaacagtaacaataacctattgtattgtcaagtga

SEQ ID NO: 80 - protein, 512 aa, Homo sapiens [sequence omitted]

SEQ ID NO: 81 - DNA, 1143 bp, Homo sapiens
  CDS (1)..(1143)
  modified_base (198): a, t, c, g, other or unknown
  modified_base (241): a, t, c, g, other or unknown
atgggctcctgggctgctgtgaacgggatctgggtggagctgcctgtggtggtaaaagaccttccagagggtgagtgggagggaggtacagggaagcgtggggcaggtatgcccagaaaggtggcctgtggcagctctttgtcccttagccactgtgctcctgacatggcatcattccttccctgcaggttggagccntcccctcatacctctctgtggttgtggcgctgggaaacctggngtctgctggtggtgaccctgtggaggcagctggccccgggcaagggcgagcaggtccccatccaggtggtacaggtgctgagtgtagtgggcacagccctgctggcccctctgtggcaccacgtggccccagtggcagggcagctccactctgtggccttcctaactctggccttggtgttggcaatggcctgttgtacctctaatgtcactttcctgcccttcctgagccacctgccacctcctttcttacggtctttcttcctgggtcagggtctcagtgccctactcccctgtgtgctggccctagtgcaaggtgtgggccgcctcgagtgcccaccagcgcccaccaatggcacctctgggcctcccctcgacttccctgagcgttttcctgccagcaccttcttctgggcactgactgcccttctggtcacttcagctgccgccttccggggtctcctgttgctgttgccatcactaccctctgtaaccacagggggctcagggcctgaacttcaactgggatccccaggagcagaggaggaagagaaggaggaagaagaggctttgccattgcaggagccaccgagccaggcagcaggcaccatccctggcccagaccctgaggcccatcagctgttctcagcccatggtgccttcctgctgggcctgatggccttcaccagtgccgtgaccaatggcgtgctgccttctgtgcagagcttttcctgtttgccctatgggcgcctggcctaccacctggctgtggtgctgggcagtgccgccaacccccttgcctgcttcctggccatgggcgtgctgtgcaggtgcaaaagggtccccaggcttggtgggtggaacttaaggttggggtccaggtcccagaacagccagccctga

SEQ ID NO: 82 - protein, 380 aa, Homo sapiens
  MOD_RES (81): Variable amino acid
MGSWAAVNGIWVELPVVVKDLPEGEWEGGTGKRGAGMPRKVACGSSLSLSHCAPDMASFLPCRLEPSPHTSLWLWRWETWXLLVVTLWRQLAPGKGEQVPIQVVQVLSVVGTALLAPLWHHVAPVAGQLHSVAFLTLALVLAMACCTSNVTFLPFLSHLPPPFLRSFFLGQGLSALLPCVLALVQGVGRLECPPAPTNGTSGPPLDFPERFPASTFFWALTALLVTSAAAFRGLLLLLPSLPSVTTGGSGPELQLGSPGAEEEEKEEEEALPLQEPPSQAAGTIPGPDPEAHQLFSAHGAFLLGLMAFTSAVTNGVLPSVQSFSCLPYGRLAYHLAVVLGSAANPLACFLAMGVLCRCKRVPRLGGWNLRLGSRSQNSQP

SEQ ID NO: 83 - DNA, 1353 bp, Homo sapiens
  CDS (1)..(1353)
atggacaccaggtctctgtggaccctggcccaagcccggaagccctgggcaggctcgactctcctgctggctgtggagaccctggcatgcagcctgtgcccacaggaccaccccttcgccttcagcttacccaatgtgctgctgcagagccagctgtttggacccacgtttcctgctgactacagcatctccttccctactcggcccccactgcaggctcagattcccaggcactcactggccccattggtccgtaatggaactgaaataagtattactagcctggtgctgcgaaaactggaccaccttctgccctcaaactatggacaagggctgggggattccctctatgccactcctggcctggtccttgtcatttccatcatggcaggtgaccgggccttcagccagggagaggtcatcatggactttgggaacacagatggttcccctcactgtgtcttctgggatcacagtctcttccagggcagggggggttggtccaaagaagggtgccaggcacaggtggccagtgccagccccactgctcagtgcctctgccagcacctcactgccttctccgtcctcatgtccccacacactgttccggaagaacccgctctggcgctgctgactcaagtgggcttgggagcttccatactggcgctgcttgtgtgcctgggtgtgtactggctggtgtggagagtcgtggtgcggaacaagatctcctatttccgccacgccgccctgctcaacatggtgttctgcttgctggccgcagacacttgcttcctgggcgccccattcctctctccagggccccgaagcccgctctgccttgtgccgccttcctctgtcatttcctctacctggccacctttttctggatgtggcgcaggccctggtgttggcccaccagctgctctttgtctttcaccagctggcaaagcaccgagttctccccctcatggtgctcctgggctacctgtgcccactggggttggcaggtgtcaccctggggctctacctacctcaagggcaatacctgagggagggggaatgctggttggatgggaagggaggggcgttatacaccttcgtgggccagtgctggccatcataggcgtgaatgggctggtactagccatggccatgctgaagttgctgagaccttcgctgtcagagggacccccagcagagaagcgccaagctctgctgggggtgatcaaagccctgctcattcttacacccatctttggcctcacctggggctggcctggccactctgttagaggaagtctccacggtccctcattacatcttcaccattctcaacaccctccaggtaggtga

SEQ ID NO: 84 - protein, 450 aa, Homo sapiens
MDTRSLWTLAQARKPWAGSTLLLAVETLACSLCPQDHPFAFSLPNVLLQSQLFGPTFPADYSISFPTRPPLQAQIPRHSLAPLVRNGTEISITSLVLRKLDHLLPSNYGQGLGDSLYATPGLVLVISIMAGDRAFSQGEVIMDFGNTDGSPHCVFWDHSLFQGRGGWSKEGCQAQVASASPTAQCLCQHLTAFSVLMSPHTVPEEPALALLTQVGLGASILALLVCLGVYWLVWRVVVRNKISYFRHAALLNMVFCLLAADTCFLGAPFLSPGPRSPLCLVPPSSVISSTWPPFSGCGAGPGVGPPAALCLSPAGKAPSSPPHGAPGLPVPTGVGRCHPGALPTSRAIPEGGGMLVGWEGRGVIHLRGPVLAIIGVNGLVLAMAMLKLLRPSLSEGPPAEKRQALLGVIKALLILTPIFGLTWGWPGHSVRGSLHGPSLHLHHSQHPPGR

SEQ ID NO: 85 - DNA, 882 bp, Homo sapiens
  CDS (1)..(882)
  modified_base (625): a, t, c, g, other or unknown
  modified_base (656): a, t, c, g, other or unknown
  modified_base (662)..(762): a, t, c, g, other or unknown
  modified_base (775)..(776): a, t, c, g, other or unknown
  modified_base (780)..(781): a, t, c, g, other or unknown
  modified_base (783)..(790): a, t, c, g, other or unknown
  modified_base (795): a, t, c, g, other or unknown
  modified_base (799): a, t, c, g, other or unknown
  modified_base (801)..(802): a, t, c, g, other or unknown
  modified_base (804)..(806): a, t, c, g, other or unknown
  modified_base (808): a, t, c, g, other or unknown
  modified_base (813): a, t, c, g, other or unknown
  modified_base (816): a, t, c, g, other or unknown
  modified_base (823): a, t, c, g, other or unknown
  modified_base (832)..(834): a, t, c, g, other or unknown
atgtctattttcacttttctctcctctcccgttctcttttttcctcttcctggttcgttgtcttctcgcgccgtccccccgcccgccccgtcgttctcttttttattgtatgccgcgtcttttccgcttcctctatttcttcctcccctctgcccttctttttccgccgtccggattgtttcgctcccgcttctttctgtcgctgctcttcgtgtcttccgctcgccccgtcgtctttttttggtccgacttttgtcccgctgttctgtccctcctcatctcctttctctcgtcgtccctctccacttcgctctcgccgtcctttttcctcctctccccttcctcccgctccttcctccgttccgcttgtcgccgctgttgtttgttctttgtgcgcccctctgttttttcccctattgttgtttctcctcgtcttgtcctttctgctctctgcgtgcgatccgccgcccctttttcctcgccccctcttatttcgtctctttttttctccgcctcgtcccgttcgtgccgcgttatccttcggccttgtttcttcgcgcttcttttttccgacctccgttttcgtgttcgctttcatctcccctttttttcaccttttcctctnttcttcgtctgcccccggtctcctccttgtntctttnnnnnnnnnnnnnnnnnnnnnnnnnnnnnnnnnnnnnnnnnnnnnnnnnnnnnnnnnnnnnnnnnnnnnnnnnnnnnnnnnnnnnnnnnnnnnnnnnnnnnttgcatgcattgnncatnngnnnnnnnngcttnaaangnncnnntntggcnaantttttgnaatattatnnnttttttcagacaaaaaacaccaaaaaaattttttggggccccacataa

SEQ ID NO: 86 - protein, 293 aa, Homo sapiens
  MOD_RES (209): Variable amino acid
  MOD_RES (219): Variable amino acid
  MOD_RES (221)..(254): Variable amino acid
  MOD_RES (259)..(265): Variable amino acid
  MOD_RES (267)..(270): Variable amino acid
  MOD_RES (272): Variable amino acid
  MOD_RES (275): Variable amino acid
  MOD_RES (278): Variable amino acid
MSIFTFLSSPVLFFPLPGSLSSRAVPPPAPSFSFLLYAASFPLPLFLPPLCPSFSAVRIVSLPLLSVAALRVFRSPRRLFLVRLLSRCSVPPHLLSLVVPLHFALAVLFPPLPFLPLLPPFRLSPLLFVLCAPLCFFPYCCFSSSCPFCSLRAIRRPFFLAPSYFVSFFLRLVPFVPRYPSALFLRASFFRPPFSCSLSSPLFFTFSSXLRLPPVSSLXLXXXXXXXXXXXXXXXXXXXXXXXXXXXXXXXXXXLHALXXXXXXXKXXXXAXFLXYYXFFQTKNTKKIFWGPT

SEQ ID NO: 87 - DNA, 735 bp, Homo sapiens
  CDS (1)..(735)
atgaatgcttccagatgcctgtctgaggaagtggggtccctccgccctctaaccatggctgtcctgtctgcctcctttgtcgtcggagtgctgggcaatgggctggtgccgtgggtgactgtcttccgcatggcccgcacagtctccaccgtctgcttcttccacctggcccttgccgatttcatgctctcactgtctctgcccatcctcgtgtactatattgtctccaggcagtggctccttggagagtgggcctgcaaactctacaccggttttgtgttcctcaccttctccaccagtaactgcctcctggtcctcatctctgtggaccgttgcatctctgtcctctaccccgtctgggccctgaaccaccgcactgagcagagggcgagctggctggccttcggggtgtggctcctggccgccgccttgtgctctgcgcacctgaaattccggacaaccagaaaatggaatggctgtatgcagtgctacttacagttcaacttggagaatgagactgcccagatgtggactcaggaggtctttgggagacaaatggcggtgatcatggcccacttcctgctgggcttcctggggcccttagcaatcataggcacctgcgcccacctcatccgggccaagctcttgcgggagggctgggtccatgccaaccggcccaagaggctgctgctggtgctggtgagcgctttatctgctggttcccatttaacgtga

SEQ ID NO: 88 - protein, 244 aa, Homo sapiens
MNASRCLSEEVGSLRPLTMAVLSASFVVGVLGNGLVPWVTVFRMARTVSTVCFFHLALADFMLSLSLPILVYYIVSRQWLLGEWACKLYTGFVFLTFSTSNCLLVLISVDRCISVLYPVWALNHRTEQRASWLAFGVWLLAAALCSAHLKFRTTRKWNGCMQCYLQFNLENETAQMWTQEVFGRQMAVIMAHFLLGFLGPLAIIGTCAHLIRAKLLREGWVHANRPKRLLLVLVSALSAGSHLT

SEQ ID NO: 89 - DNA, 1527 bp, Homo sapiens
  CDS (1)..(1527)
atgacgtccacctgcaccaacagcacgcgcgagagtaacagcagccacacgtgcatgcccctctccaaaatgcccatcagcctggcccacggcatcatccgctcaaccgtgctggttatcttcctcgccgcctctttcgtcggcaacatagtgctggcgctagtgttgcagcgcaagccgcagctgctgcaggtgaccaaccgttttatctttaacctcctcgtcaccgacctgctgcagatttcgctcgtggccccctgggtggtggccacctctgtgcctctcttctggcccctcaacagccacttctgcacggccctggttagcctcacccacctgttcgccttcgccagcgtcaacaccattgtcgtggtgtcagtggatcgctacttgtccatcatccaccctctctcctacccgtccaagatgacccagcgccgcggttacctgctcctctatggcacctggattgtggccatcctgcagagcactcctccactctacggctggggccaggctgcctttgatgagcgcaatgctctctgctccatgatctggggggccagccccagctacactattctcagcgtggtgtccttcatcgtcattccactgattgtcatgattgcctgctactccgtggtgttctgtgcagcccggaggcagcatgctctgctgtacaatgtcaagagacacagcttggaagtgcgagtcaaggactgtgtggagaatgaggatgaagagggagcagagaagaaggaggagttccaggatgagagtgagtttcgccgccagcatgaaggtgaggtcaaggccaaggagggcagaatggaagccaaggacggcagcctgaaggccaaggaaggaagcacggggaccagtgagagtagtgtagaggccaggggcagcgaggaggtcagagagagcagcacggtggccagcgacggcagcatggagggtaaggaaggcagcaccaaagttgaggagaacagcatgaaggcagacaagggtcgcacagaggtcaaccagtgcagcattgacttgggtgaagatgacatggagtttggtgaagacgacatcaatttcagtgaggatgacgtcgaggcagtgaacatcccggagagcctcccacccagtcgtcgtaacagcaacagcaaccctcctctgcccaggtgctaccagtgcaaagctgctaaagtgatcttcatcatcattttctcctatgtgctatccctggggccctactgctttttagcagtcctggccgtgtgggtggatgtcgaaacccaggtaccccagtgggtgatcaccataatcatctggcttttcttcctgcagtgctgcatccacccctatgtctatggctacatgcacaagaccattaagaaggaaatccaggacatgctgaagaagttcttctgcaaggaaaagcccccgaaagaagatagccacccagacctgcccggaacagagggtgggactgaaggcaagattgtcccttcctacgattctgctacttttccttga

SEQ ID NO: 90 - protein, 508 aa, Homo sapiens
MTSTCTNSTRESNSSHTCMPLSKMPISLAHGIIRSTVLVIFLAASFVGNIVLALVLQRKPQLLQVTNRFIFNLLVTDLLQISLVAPWVVATSVPLFWPLNSHFCTALVSLTHLFAFASVNTIVVVSVDRYLSIIHPLSYPSKMTQRRGYLLLYGTWIVAILQSTPPLYGWGQAAFDERNALCSMIWGASPSYTILSVVSFIVIPLIVMIACYSVVFCAARRQHALLYNVKRHSLEVRVKDCVENEDEEGAEKKEEFQDESEFRRQHEGEVKAKEGRMEAKDGSLKAKEGSTGTSESSVEARGSEEVRESSTVASDGSMEGKEGSTKVEENSMKADKGRTEVNQCSIDLGEDDMEFGEDDINFSEDDVEAVNIPESLPPSRRNSNSNPPLPRCYQCKAAKVIFIIIFSYVLSLGPYCFLAVLAVWVDVETQVPQWVITIIIWLFFLQCCIHPYVYGYMHKTIKKEIQDMLKKFFCKEKPPKEDSHPDLPGTEGGTEGKIVPSYDSATFP

SEQ ID NO: 91 - DNA, 1263 bp, Homo sapiens
  CDS (1)..(1263)
atggttctctgttgtagaggttctctgttgtggatggttctctgttgtggatggttctctgttacagagggtctctgttgtggagggtctctgttgtggatggttctctgttgtgggtgggtctctgttgtgggtgggtctctgttgtggagggttctctgttgtggagggttctctgttgtggagggttctctgttgtggagggtctctgttggggatggttctctgttgtggaggctctctgttgtggaggttctctgttgtggaggatctctgttgtggatggttctgtgttgtggagggttctgtgttgtggagggttctctgttgtggagggtctctgttgtggatggttctctgtcgtggaggctctctgtcgtggaggctccctgtcgtggaggctctctgtcgtggagggtctctgtcgtgggtggttctttgttgtggagggtctctgttgtggatggttctctgttgtggagggtctctgttgtggagggtctctgttgtggagggttctctgttgtggagggtctctgttgtggagggttctctgttgtggagggttgtctgttgtggagggttctctgttgtggagcgtctctgttgtggagagtctctgttgtggagggttctctgttgtggagagtctgttgtggagggttctctgttgtggagagtctctgttgtggatggttctctgttgtggagggttctctgttgtggagggttctctgttgtggatggttctctgttatggagggttctctgttgtggagggttctctcttgtggatggttctctgttgtggatggttctctgttatggagggtctctgttgtggagggtctctgttgtggagagtctgttgtggatggttctctgttgtggagagtctctgttgtggagggtctctgttgtgggtggttctttgttgtgggtggttctctgttgtggatggttctttgttgtgggtggttctctgttgtgaatggttctttgttgtggatgggtctctgttgtggagggttctctgttgtggatgggtctctgttgtggatggttctctgttgtggatgggtctctgttgtggatgggtctctgttgtggagggtctctgttgtggatggttctctgttttggatgggtctctgttgtggaggttctctgttgtggaagttctttgttgtatttgctgcaaatatgcatgataagatgcttaggagcatctacccactagatgtcagtagcagccccacttag

SEQ ID NO: 92 - protein, 420 aa, Homo sapiens
MVLCCRGSLLWMVLCCGWFSVTEGLCCGGSLLWMVLCCGWVSVVGGSLLWRVLCCGGFSVVEGSLLWRVSVGDGSLLWRLSVVEVLCCGGSLLWMVLCCGGFCVVEGSLLWRVSVVDGSLSWRLSVVEAPCRGGSLSWRVSVVGGSLLWRVSVVDGSLLWRVSVVEGLCCGGFSVVEGLCCGGFSVVEGCLLWRVLCCGASLLWRVSVVEGSLLWRVCCGGFSVVESLCCGWFSVVEGSLLWRVLCCGWFSVMEGSLLWRVLSCGWFSVVDGSLLWRVSVVEGLCCGESVVDGSLLWRVSVVEGLCCGWFFVVGGSLLWMVLCCGWFSVVNGSLLWMGLCCGGFSVVDGSLLWMVLCCGWVSVVDGSLLWRVSVVDGSLFWMGLCCGGSLLWKFFVVFAANMHDKMLRSIYPLDVSSSPT

SEQ ID NO: 93 - DNA, 984 bp, Homo sapiens
  CDS (1)..(984)
atgacgcccaacagcactggcgaggtgcccagccccattcccaagggggctttggggctctccctggccctggcaagcctcatcatcaccgcgaacctgctcctagccctgggcatcgctgggaccgccgcctgcgcagccacctgctggctgcttcttcctgagcctactgctggctgggctgctcacgggtctggcattgccacattgccagggctgtggaaccagagtcgccggggttactggtcctgcctcctcgtctacttggctcccaacttctccttcctctccctgcttgccaacctcttgctggtgcacggggagcgctacatggcagtcctgaggccactccagccccctgggagcattcggctggccctgctcctcacctgggctggtcccctgctctttgccagtctgcccgctctggggtggaaccactggacccctggtgccaactgcagctcccaggctatcttcccagccccctacctgtacctcgaagtctatgggctcctgctgcccgccgtgggtgctgctgccttcctctctgtccgcgtgctggccactgcccaccgccagctgcaggacatctgccggctggagcgggcagtgtgccgcgatgagccctccgccctggcccgggcccttacctggaggcaggcaagggcacaggctggagccatgctgctcttcgggctgtgctgggggccctacgtggccacactgctcctctcagtcctggcctatgagcagcgcccgccactggggcctgggacactgttgtccctcctctccctaggaagtgccagtgcagcggcagtgcccgtagccatggggctgggcgatcagcgctacacagccccctggaggcagccgcccaaaggtgcctgcaggggctgtggggaagagcctcccgggacagtcccggccccagcattgcctaccacccaagcagccaaagcagtgtcgacctggacttga

SEQ ID NO: 94 - protein, 327 aa, Homo sapiens
MTPNSTGEVPSPIPKGALGLSLALASLIITANLLLALGIAGTAACAATCWLLLPEPTAGWAAHGSGIATLPGLWNQSRRGYWSCLLVYLAPNFSFLSLLANLLLVHGERYMAVLRPLQPPGSIRLALLLTWAGPLLFASLPALGWNHWTPGANCSSQAIFPAPYLYLEVYGLLLPAVGAAAFLSVRVLATAHRQLQDICRLERAVCRDEPSALARALTWRQARAQAGAMLLFGLCWGPYVATLLLSVLAYEQRPPLGPGTLLSLLSLGSASAAAVPVAMGLGDQRYTAPWRQPPKGACRGCGEEPPGTVPAPALPTTQAAKAVSTWT

SEQ ID NO: 95 - DNA, 909 bp, Homo sapiens
  CDS (1)..(909)
atgtctcctgcagctgctgctgagccagatggggaccagcaggacagacacgtcagcaaactcatcttctgcttctttgtcttcggcgccgtcttgttgtgtgtgggagtcctgctctccatctttgggttccaggcatgccaatataagcccctcccagactgccccatggtgctcaaggtggcggggcctgcatgtgccgtggttgggcttggggctgtgatcctggcccgctcccgggcgcaacttcagctcggtgcagggctgcagagaggtcagcagatggaccccgaccgagccttcatctgtggagagagccgccagtttgcccagtgccttatctttgggtttctgttcttgacaagcggcatgctcatcagcgtcctgggcatttgggtccctggatgtggctccaaatgggcgcaggaaccgctaaacgagacagacactggcgactcagagccccggatgtgtgggttcctttctctgcagatcatggggcccttgattgtgcttgtgggattgtgtttcttcgtggttgcccatgttaagaagagaaacacgctgaatgctggccaggatgcctctgagagagaagagggacagatccagattatggagcctgtccaggtcactgtaggtgggttgctgttatttgcgttctgcttctatcacagtggctttgcagcagggtttcaccagctgctcttggttctcgtctggattctctttctcaattcttccatctctcacacatgtgtgtgcacacgcacacacccccatcatgtgtacatacacaatggtgctgctgtgggaagccccgtaggaaccttgtatacatcttttcccccccagcaactctttcctactttgcaaagcattgggatattaagtagtgaccttgactga

SEQ ID NO: 96 - protein, 302 aa, Homo sapiens
MSPAAAAEPDGDQQDRHVSKLIFCFFVFGAVLLCVGVLLSIFGFQACQYKPLPDCPMVLKVAGPACAVVGLGAVILARSRAQLQLGAGLQRGQQMDPDRAFICGESRQFAQCLIFGFLFLTSGMLISVLGIWVPGCGSKWAQEPLNETDTGDSEPRMCGFLSLQIMGPLIVLVGLCFFVVAHVKKRNTLNAGQDASEREEGQIQIMEPVQVTVGGLLLFAFCFYHSGFAAGFHQLLLVLVWILFLNSSISHTCVCTRTHPHHVYIHNGAAVGSPVGTLYTSFPPQQLFPTLQSIGILSSDLD

SEQ ID NO: 97 - DNA, 708 bp, Homo sapiens
  CDS (1)..(708)
atggactacaagtcccggcaggccccgctctggctcggactctgggtgggtctgggtctccggccgactttccgtgtctgctccccgagtctctgcgggccgctttggccccgctctgccagtctgtgtgtgtgggggtctgtctctgagactctttgcctgtctctgggtctctgtccctctttctccgccgctgaccggctgtctcgccccagttgtgcctgtgtgtgtggtgggggtgtctctgcctctgccccttcctatctctgcctgtctccctttatctctctgcctctcatttctcttgctgcctgtgcgtctctgagtcttctttgcctgtctctccctgcgtgtctctctctctgtctctgtggagtctctcgacctctgtcgctcacttctgtctctttatcctttttcttaggggctccattgcgtccctgctcggcccttgggacagccctggggcccggtttgttttgtgctttggcacccaggagggtgagagagttagtgggggcgaggcagctgtggggggtgcggctgggaaatcccttcaaggagcttctccttccttcccccactgctccaggctctgccttgccctgctctgccctgcccggggctccgagtccaggggacatgcctggctgtgtactacactgcacttcgcatcgtggggcctcagtttccctagctgtgaaatga

SEQ ID NO: 98 - protein, 235 aa, Homo sapiens [sequence omitted]

SEQ ID NO: 99 - DNA, 708 bp, Homo sapiens
  CDS (1)..(708)
atgctgtatctgctggtgcctggagagtcatctgccctgggcttctgcgttctggtgtgtgcagtgctgtatctgctggtgcctggagagtcatctgccctgggcttccccgtcctggtgtgtgcaatgctgtatctgctggtgcctggagagtcatcttccctcggcttctgtgtcctggtgtgtgcagtgctgtatctgctggtgcctggagagtcatctgccctgggcttctgcgtcctggtgtgtgcaatgctgtatctgctggtgcctggagtcatcttccctgggcttctgcgtcctggtgtgtgcagtgctgtatctgctggtgtctggagagtcatctgccctgggcttctgcgttctggtgtgtgcagtgctgtatctgctggtgcctggagtcatctgccctgggcttccgcgtcctggtgtgtgcagtgctgtatctgctggtgcctggagtcatctgccctgggcttctgcgtcctggtgtctgcaatgctgtatctgcgggtgcctggagagtcatctgccctgggcttccgcgtcctggtgtgtgcagtgctgtatctgctggtgcctggagagtcatctgccctgggcttctgcgtcctggtgtgtgcagtgctgtatctgctggtaattatgcagatgggattgcccttgagggagagtcactggcaaatcctgtctactaccatttattga

SEQ ID NO: 100 - protein, 235 aa, Homo sapiens
MLYLLVPGESSALGFCVLVCAVLYLLVPGESSALGFPVLVCAMLYLLVPGESSSLGFCVLVCAVLYLLVPGESSALGFCVLVCAMLYLLVPGVIFPGLLRPGVCSAVSAGVWRVICPGLLRSGVCSAVSAGAWSHLPWASASWCVQCCICWCLESSALGFCVLVSAMLYLRVPGESSALGFRVLVCAVLYLLVPGESSALGFCVLVCAVLYLLVIMQMGLPLRESHWQILSTTIY

SEQ ID NO: 101 - DNA, 801 bp, Homo sapiens
  CDS (1)..(801)
atggcctcccggtatgtggcagtgggaatgatcttatcacagaccgtggtgggagtcctggggagcttctctgttcttctccattatctctccttttactgcactgggtgcaggttaaggtccacagatttgattgttaagcacctgattgtagccaacttcttagctctccgctgtaaaggagtcccccagacaatggcagcttttggggttagatattttctcaatgctcttgggtgcaaacttgttttctatctccatagagtgggcaggggagtgtccattggcaccacctgcctcttgagtgtcttccaggtgatcacggtcagctccaggaaatccaggtgggcaaaacttaaagagaaagcccccaagcatgttggcttttctgttctcctgtgctggatcgtgtgcatgttggtaaacatcatctttcccatgtatgtgactggcaaatggaactacacaaacatcacagtgaacgaggatttgggatactgttctgggggaggcaacaacaaaatcgcacagacactgcgtgcaatgttgttatcattccctgatgtgttgtgtctggggctcatgctctgggtcagcagctccatggtttgcatactgcacaggcacaagcagcgggtccagcacattgataggagcgatctctcccccagagcctccccagagaacagagctacgcagagcatcttcatcctggtgagcaccttgtgtcttcttacactctctcctgccttttccaagtttgtatggctcttttggataatcccaatagtttactggtga

SEQ ID NO: 102 - protein, 266 aa, Homo sapiens
MASRYVAVGMILSQTVVGVLGSFSVLLHYLSFYCTGCRLRSTDLIVKHLIVANFLALRCKGVPQTMAAFGVRYFLNALGCKLVFYLHRVGRGVSIGTTCLLSVFQVITVSSRKSRWAKLKEKAPKHVGFSVLLCWIVCMLVNIIFPMYVTGKWNYTNITVNEDLGYCSGGGNNKIAQTLRAMLLSFPDVLCLGLMLWVSSSMVCILHRHKQRVQHIDRSDLSPRASPENRATQSIFILVSTLCLLTLSPAFSKFVWLFWIIPIVYW

SEQ ID NO: 103 - DNA, 1029 bp, Homo sapiens
  CDS (1)..(1029)
  modified_base (120)..(219): a, t, c, g, other or unknown
atgatgtccttctgtgtaatttttgaaagttgtaaggctttccttttgatatttctaaatacaacacatgtagaatttatttttatgaatgatgaggtaaggtcaaggcatattttttgnnnnnnnnnnnnnnnnnnnnnnnnnnnnnnnnnnnnnnnnnnnnnnnnnnnnnnnnnnnnnnnnnnnnnnnnnnnnnnnnnnnnnnnnnnnnnnnnnnnntttcatggctggatttccatgcccttttgctgtatttacttgatgcctctgctgagcaatgctacaattctactgacaatctggtctgatcgtactcttcgggaccctatgttctactttctagccatcttatcagccatagacctagccctctcaacatcctcagtgcctcgtatgttgggtatcttctggtttgatgcacataaaattggctttggagcctgggtagcccagatgtttctgatacacactttcacaggaatggagtccactgtgctgctggcaatggcctttgaccgctatgtggccatctgtacatcactccactatacctctactctgacaccccgagtattggcaggcattggtgtgagcattataatgcgcccagtcctgctcatgttgcccattctctacctaacccatcgtctgcccttctgtgaggctcggattattgcccactcctactgtgagcacatgggtattgctaagttggcctgtgctagcattcacatcaatgctatttatgggctttttgtggcttcttattttggatgtcgcacttgttggaatctcctatacctacattctccgagctgttttccacctcccatctcaagacgctcgtcacaaagcactgagaacgtgtggctcacatgttggggtcatgtgtgttttctatacaccctccctcttctccttcctcacctaccgatttcgcaaaaaaaattccccgttatgtccacattcttgttgccaacctctatgtggtcattccacctgccctcaatcctattatctatggtgtga

SEQ ID NO: 104 - protein, 342 aa, Homo sapiens
  MOD_RES (40)..(73): Variable amino acid
MMSFCVIFESCKAFLLIFLNTTHVEFIFMNDEVRSRHIFXXXXXXXXXXXXXXXXXXXXXXXXXXXXXXXXXXFHGWISMPFCCIYLMPLLSNATILLTIWSDRTLRDPMFYFLAILSAIDLALSTSSVPRMLGIFWFDAHKIGFGAWVAQMFLIHTFTGMESTVLLAMAFDRYVAICTSLHYTSTLTPRVLAGIGVSIIMRPVLLMLPILYLTHRLPFCEARIIAHSYCEHMGIAKLACASIHINAIYGLFVASYFGCRTCWNLLYLHSPSCFPPPISRRSSQSTENVWLTCWGHVCFLYTLPLLLPHLPISQKKFPVMSTFLLPTSMWSFHLPSILLSMV

SEQ ID NO: 105 - DNA, 795 bp, Homo sapiens
  CDS (1)..(795)
  modified_base (30): a, t, c, g, other or unknown
  modified_base (32): a, t, c, g, other or unknown
  modified_base (45): a, t, c, g, other or unknown
  modified_base (74): a, t, c, g, other or unknown
atggccatgtattcttcctctcaatgctgncngtcatggacatcntgctgtctaccacactgtgcccaaggccntagcatcttttggcttcaagcacataacattgcttttgatgcctgtgtcacccaaggcttctttgtccatatgatgtttgtgggggagtcagctatcctgttagccatggcctttgatcgctttgtggccatttgtgccccactgagatatacaacagtgctaacatggcctgttgtggggaggattgctctggccgtcatcacccgaagcttctgcatcatcttcccagtcatattcttgctgaagcggctgcccttctgcctaaccaacattgttcctcactcctactgtgagcatattggagtggctcgtttagcctgtgctgacatcactgttaacatttggtatggcttctcagtgcccattgtcatggtcatcttggatgttatcctcatcgctgtgtcttactcactgatcctccgagcagtgtttcgtttgccctcccaggatgctcggcacaaggccctcagcacttgtggctcccacctctgtgtcatccttatgttttatgttccatccttctttaccttattgacccatcattttgggcgtaatattcctcaacatgtccatatcttgctggccaatctttatgtggcagtgccaccaatgctgaaccccattgtctatggtgtgaagactaagcagatacgtgagggtgtagcccaccggttctttgacatcaagacttggtgctgtacctcccctctgggctcatga

SEQ ID NO: 106 - protein, 264 aa, Homo sapiens
  MOD_RES (10)..(11): Variable amino acid
  MOD_RES (15): Variable amino acid
  MOD_RES (25): Variable amino acid
MAMYSSSQCXXSWTXCCLPHCAQGXSIFWLQAHNIAFDACVTQGFFVHMMFVGESAILLAMAFDRFVAICAPLRYTTVLTWPVVGRIALAVITRSFCIIFPVIFLLKRLPFCLTNIVPHSYCEHIGVARLACADITVNIWYGFSVPIVMVILDVILIAVSYSLILRAVFRLPSQDARHKALSTCGSHLCVILMFYVPSFFTLLTHHFGRNIPQHVHILLANLYVAVPPMLNPIVYGVKTKQIREGVAHRFFDIKTWCCTSPLGS

SEQ ID NO: 107 - DNA, 762 bp, Homo sapiens
  CDS (1)..(762)
atgtatttcttccttaattacctcgcactctcagatctttgctacatatccactgtggcccccaagctaatgattgacctactaacagaaaggaagatcgtttcctataataactgcatgatacagctatttatcactcacttccttggagacattgagatcttcatactcaaagcaatggcctatgaccactacatagccatctgcaagcacctgcactacaccatcatcacgaccaagcaaagctgtaacaccatcatcatagcttgttgtactgggggatttatacactctgccagtcagtttcttcttaccatcttcttaccgttctgtggtcttaatgagatagatcagtacttctgctatgtgtatcctctgctgaagttggctcgcattgatatatacagaattggtttcttggtaattgttaattcaggcctgatttctttgttggcttttgtgattttgatggtgtcttattatttgatattatccaccatcagggtttactctgctgagagtcataccaaagctctttcaacctgtagctctcacataatagttgtggtcctattctttgtgcctgccctcttcatttacatcagaccagccataacttttccagaagataaagtgtttgttctcttctgtgccatcattgctcccatgttcagtcttcttatctacatgctgagaaaggtggagatgaagaacgctgtaaggaaaatgtggtgtcatcaattgcttctggcaaggaagtaa

SEQ ID NO: 108 - protein, 253 aa, Homo sapiens
MYFFLNYLALSDLCYISTVAPKLMIDLLTERKIVSYNNCMIQLFITHFLGDIEIFILKAMAYDHYIAICKHLHYTIITTKQSCNTIIIACCTGGFIHSASQFLLTIFLPFCGLNEIDQYFCYVYPLLKLARIDIYRIGFLVIVNSGLISLLAFVILMVSYYLILSTIRVYSAESHTKALSTCSSHIIVVVLFFVPALFIYIRPAITFPEDKVFVLFCAIIAPMFSLLIYMLRKVEMKNAVRKMWCHQLLLARK

SEQ ID NO: 109 - DNA, 675 bp, Homo sapiens
  CDS (1)..(675)
atgttctcctgcaacaccagcacttctggtcagtctaccttcctcctcactggttttccaggcctggaagcctctcatcattgggtttccatccccatcaacctcttctgtgtggtttccatcctgggtaataatatcatcctcttcctgatccacacagatccagccttacatgaacccatgtatatcttcctgtccatgttggcagcctctgatctgggcctctgtgcctctaccttccccactatggtgcgtctcttctggctgggagctcgtgagctgccctttgatctctgtgcagcacagatgttcttcatccataccttcacctatgtggagtccggtgtactgctggccatggccttcgatcgctttattgccatccgggaccctctgcattatgccataatcattacctgctcagtcacagccgaggtgggaactgccattctggtgagggctgttctgctcaacctcccgggacctatcctcctgcagcagctgctctttcccaagatcagcgctctctgtcactgctactgcctgcactgtgaccttgtggggttggcctgctcagacacccagatcaatagcctggttggcctggtttccatcctcttctcactgtgccttgactccttcctcatcatgctttcatatgccctgatcctatga

SEQ ID NO: 110 - protein, 224 aa, Homo sapiens [sequence omitted]

SEQ ID NO: 111 - DNA, 957 bp, Homo sapiens
  CDS (1)..(957)
atgcctactgtaaaccacagtggcactagccacacagtcttccacttgctgggcatccctggcctacaggaccagcacatgtggatttctatcccattcttcatttcctatgtcaccgcccttcttgggaacagcctgctcatcttcattatcctcacaaagcgcagcctccatgaacccatgtacctcttcctctgcatgctggctggagcagacattgtcctctccacgtgcaccattcctcaggccttagctatcttctggttccgtgctggggacatctccctggatcgttgcatcactcagctcttcttcatccattccaccttcatctctgagtcagggatcttgctggtgatggcctttgaccactatattgccatatgctacccactgaggtacaccaccattcttacaaatgctctgatcaagaaaatttgtgtgactgtctctctgagaagttatggtacaattttccctatcatatttcttttaaaaagattgactttctgccagaataatattattccacacaccttttgtgaacacattggcctagccaaatatgcatgtaatgacattcgaataaacatttggtatgggttttccattctaatgtcgacggtggtcttagatgttgtactaatttttatttcctatatgctgattctccatgctgtcttccacatgccttctccagatgcttgccacaaagctctcaacacatttggctcccatgtctgcatcatcatcctcttttatgggtctggcatcttcacaatccttacccagaggtttggacgccacattccaccttgtatccacatcccgttggctaatgtctgcattctggctccacctatgctgaatcccattatttatgggatcaaaaccaagcaaatccaggaacaggtggttcagtttttgtttataaaacagaaaataactttggtttaa

SEQ ID NO: 112 - protein, 318 aa, Homo sapiens
MPTVNHSGTSHTVFHLLGIPGLQDQHMWISIPFFISYVTALLGNSLLIFIILTKRSLHEPMYLFLCMLAGADIVLSTCTIPQALAIFWFRAGDISLDRCITQLFFIHSTFISESGILLVMAFDHYIAICYPLRYTTILTNALIKKICVTVSLRSYGTIFPIIFLLKRLTFCQNNIIPHTFCEHIGLAKYACNDIRINIWYGFSILMSTVVLDVVLIFISYMLILHAVFHMPSPDACHKALNTFGSHVCIIILFYGSGIFTILTQRFGRHIPPCIHIPLANVCILAPPMLNPIIYGIKTKQIQEQVVQFLFIKQKITLV

SEQ ID NO: 113 - DNA, 951 bp, Homo sapiens
  CDS (1)..(951)
atgaagatagcaaacaacacagtagtgacagaatttatcctccttggtctgactcagtctcaagatattcagctcttggtctttgtgctgatcttaattttctaccttatcatcctccctggaaattttctcattattttcaccataaggtcagaccctgggctcacagcccccctctatttctttctgggcaacttggccttcctggatgcatcctactccttcattgtggctcccaggatgttggtggacttcttctctgagaagaaggtaatctcctacagaggctgcatcactcagctctttttcttgcacttccttggaggaggggagggattactccttgttgtgatggcctttgaccgctacatcgccatctgccggcctctgcactgttcaactgtcatgaaccctagagcctgctatgcaatgatgttggctctgtggcttgggggttttgtccactccattatccaggtggtcctcatcctccgcttgcctttttgtggcccaaaccagctggacaacttcttctgtgatgtccgacaggtcatcaagctggcttgcaccgacatgtttgtggtggagcttctgatggtcttcaacagtggcctgatgacactcctgtgctttctggggcttctggcttcctatgcagtcatcctctgccatgttcgtagggcagcttctgaagggaagaacaaggccatgtccatgtgcaccactcgtgtcattattatacttcttatgtttggacctgctatcttcatctacatgtgccctttcagggccttaccagctgacaagatggtttctctctttcacacagtgatctttccattgatgaatcctatgatttatacccttcgcaaccaggaagtgaaaacttccatgaagaggttattgagtcgacatgtagtctgtcaagtggattttataataagaaactga

SEQ ID NO: 114 - protein, 316 aa, Homo sapiens
MKIANNTVVTEFILLGLTQSQDIQLLVFVLILIFYLIILPGNFLIIFTIRSDPGLTAPLYFFLGNLAFLDASYSFIVAPRMLVDFFSEKKVISYRGCITQLFFLHFLGGGEGLLLVVMAFDRYIAICRPLHCSTVMNPRACYAMMLALWLGGFVHSIIQVVLILRLPFCGPNQLDNFFCDVRQVIKLACTDMFVVELLMVFNSGLMTLLCFLGLLASYAVILCHVRRAASEGKNKAMSMCTTRVIIILLMFGPAIFIYMCPFRALPADKMVSLFHTVIFPLMNPMIYTLRNQEVKTSMKRLLSRHVVCQVDFIIRN

SEQ ID NO: 115 - DNA, 684 bp, Homo sapiens
  CDS (1)..(684)
atgttggtggacttcctctctgagaagaaggtaatctcctacagaggctgcatcactcagctctttttcttgcacttccttggaggaggggagggattactccttgttgtgatggcctttgactgctacatcaccatctgcctgcctctgcagtattcaactgtcatgaactctagagcctgctatgcaatgatgttggctctgtggcttgggggttttgtccactccattatccaggtggtcctcatcatccgcttgcctttttgtggcccaaaccagctggacaacttcttctgtgatgtccgacaggtcatcaagctggcttgcaccgacatgtttgtggtggagcttctgatggtcttcaatagtggcctgatgacactcatgtgctttctgggacttctggcctcctatgcagtcattctttgtcgcatacgagcgtcttcttctgaggcaaaaaacaaggccatgtccacatgcaccacccatatcattgttatattcttcatgtttggacctggcatcttcatctacacgtgccccttcagggctttcccagccgacaaggtggtttctctcttccacacagtgattcttcctttgttgaatcctgtcatttatacccttcataaccaggaagtgaaagcttccatgaaaaaggtgtttaataaacacatagcctga

SEQ ID NO: 116 - protein, 227 aa, Homo sapiens
MLVDFLSEKKVISYRGCITQLFFLHFLGGGEGLLLVVMAFDCYITICLPLQYSTVMNSRACYAMMLALWLGGFVHSIIQVVLIIRLPFCGPNQLDNFFCDVRQVIKLACTDMFVVELLMVFNSGLMTLMCFLGLLASYAVILCRIRASSSEAKNKAMSTCTTHIIVIFFMFGPGIFIYTCPFRAFPADKVVSLFHTVILPLLNPVIYTLHNQEVKASMKKVFNKHIA

SEQ ID NO: 117 - DNA, 942 bp, Homo sapiens
  CDS (1)..(942)
atggaaactgcaaattacaccaaggtgacagaatttgttctcactggcctatcccagactccagaggtccaactagtcctatttgttatatttctatccttctatttgttcatcctaccaggaaatatccttatcatttgcaccatcagtctagaccctcatctgacctctcctatgtatttcctgttggctaatctggccttccttgatatttggtactcttccattacagcccctgaaatgctcatagacttctttgtggagaggaagataatttcttttgatggatgcattgcacagctcttcttcttacactttgctggggcttcggagatgttcttgctcacagtgatggcctttgacctctacactgctatctgccgacccctccactatgctaccatcatgaatcaacgtctctgctgtatcctggtggctctctcctggagggggggcttcattcattctatcatacaggtggctctcattgttcgacttcctttctgtgggcccaatgagttagacagttacttctgtgacatcacacaggttgtccggattgcctgtgccaacaccttcccagaggagttagtgatgatctgtagtagtggtctgatctctgtggtgtgtttgattgctctgttaatgtcctatgccttccttctggccttgttcaagaaactttcaggctcaggtgagaataccaacagggccatgtccacctgctattcccacattaccattgtggtgctaatgtttgggccatccatctacatttatgctcgcccatttgactcgttttccctagataaagtggtgtctgtgttcaatactttaatattccctttacgtaatcccattatttacacattgagaaacaaggaagtaaaggcagccatgaggaagttggtcaccaaatatattttgtgtaaagagaagtga

SEQ ID NO: 118 - protein, 313 aa, Homo sapiens
METANYTKVTEFVLTGLSQTPEVQLVLFVIFLSFYLFILPGNILIICTISLDPHLTSPMYFLLANLAFLDIWYSSITAPEMLIDFFVERKIISFDGCIAQLFFLHFAGASEMFLLTVMAFDLYTAICRPLHYATIMNQRLCCILVALSWRGGFIHSIIQVALIVRLPFCGPNELDSYFCDITQVVRIACANTFPEELVMICSSGLISVVCLIALLMSYAFLLALFKKLSGSGENTNRAMSTCYSHITIVVLMFGPSIYIYARPFDSFSLDKVVSVFNTLIFPLRNPIIYTLRNKEVKAAMRKLVTKYILCKEK

SEQ ID NO: 119 - DNA, 807 bp, Homo sapiens
  CDS (1)..(807)
atggatgacgaaaatgcaacattgctgacagagtttgttctcacaggacttacatatcaatcagagtggaaaatacccctgttcctggcattcttggtaatatatctcatcaccatcatggcaaatcttggtctgattgctgtcatctggaaagactcacaccttcacattccaatgtacttattccttgggagtttagcctttgtggatgcttggttatcatcctcagtgacccctaagatgctgatcagctttttagctaagagtatgattatttctgtctctgaatgcaagatacaatttttttcctttggaatcagtggaaccacagaatgttttctcttggcaacaatggcatatgatcgctatgtagccatatgcaaacctttactttatccagtcattatgaccaatggactgtgtatctggctattagtcttgtcatttataggtggctttcttcatgccttaattcatgaaggtattttattcagattaaccttctgtaattccaacataatacatcacttttactgtgacattatcccattgttaaagatttcctgtactgacccttctattaattttttaatgctttttattttgtctggttcaatacaggtattcactattttgactgttcttgtctcttatacatttgtcctctttacaatcttaaaaaaaaaagtctgccaaagacataaggaaagccttttccacctgtggagcccatctcttatctgtttctttatactatggcccccttctcttcatgtatgtgcaccctgcatctccacaagcagatga

SEQ ID NO: 120 - protein, 268 aa, Homo sapiens [sequence omitted]

SEQ ID NO: 121 - DNA, 1098 bp, Homo sapiens
  CDS (1)..(1098)
  modified_base (146): a, t, c, g, other or unknown
atgatgacagtgattttaaaaactttattgggacagatacagggcctcagtggaaacccacactctactacgtctagaatgtactttttatgtttctgtacttctctactaggttttaaggtacactgggtctccagattgatcangaaactttacatggcatctcccaacaatgactccactgccccagtctctgaattcctcctcatctgcttccccaacttccagagctggcagcactggttgtctctgcccctcagccttctcttcctcctggccatgggagctaacaccaccctcctgatcaccatccagctggaggcctctctgcaccagcccctgtactacctgctcagcctcctctccctgctggacatcgtgctctgcctcaccgtcatccccaaggtcctggccatcttctggtttgacctcaggtcgatcagcttcccagcctgcttcctccagatgttcatcatgaacagttttttgaccatggagtcctgcacgttcatggtcatggcctatgaccgttatgtggccatctgccatccattgagatacccgtctatcatcactgaccagtttgtggctagggccgtggtctttgttatagcccggaatgcctttgtttctcttcctgttcccatgctttctgccaggctcagatactgtgcaggaaacataatcaagaactgcatctgcagtaacctgtctgtgtccaaactctcttgtgatgacatcactttcaatcagctctaccagtttgtggcaggctggactctgttgggctctgatcttatccttattgttatctcctattcttttatattgaaagttgtgcttaggatcaaggccgagggtgctgtggccaaggccttgagcacgtgtggttcccacttcatcctcatcctcttcttcagcacagtcctgctggttctggtcatcactaacctggccaggaagagaattcctccagatgtccccatcctgctcaacatcctgcaccacctcattcccccagctctgaaccccattgtttatggtgtgagaaccaaggagatcaagcagggaatccaaaacctgctgaagaggttgtaa

SEQ ID NO: 122 - protein, 365 aa, Homo sapiens
  MOD_RES (49): Variable amino acid
MMTVILKTLLGQIQGLSGNPHSTTSRMYFLCFCTSLLGFKVHWVSRLIXKLYMASPNNDSTAPVSEFLLICFPNFQSWQHWLSLPLSLLFLLAMGANTTLLITIQLEASLHQPLYYLLSLLSLLDIVLCLTVIPKVLAIFWFDLRSISFPACFLQMFIMNSFLTMESCTFMVMAYDRYVAICHPLRYPSIITDQFVARAVVFVIARNAFVSLPVPMLSARLRYCAGNIIKNCICSNLSVSKLSCDDITFNQLYQFVAGWTLLGSDLILIVISYSFILKVVLRIKAEGAVAKALSTCGSHFILILFFSTVLLVLVITNLARKRIPPDVPILLNILHHLIPPALNPIVYGVRTKEIKQGIQNLLKRL

SEQ ID NO: 123 - DNA, 957 bp, Homo sapiens
  CDS (1)..(957)
atgattcagcctatggcgtcacccagcaacagctccactgtcccagtctctgaattcctcctcacctgcttccccaacttccagagttggcagcactggctctccctgcccctcagccttctcttcctcctggccatgggagctaacaccaccctcctgatcaccatccagctggaggcctctctgcaccagcccctgtactacctgctcagcctcctctccctgctggacatcgtgctctgcctcaccgtcatccccaaggtcctggccatcttctggtatgatcttaggtcgatcagcttccctgcctgcttcctccagatgttcatcatgaacagtttcctccccatggagtcctgcacgtttatggtcatggcctatgaccgttatgtggccatctgccacccactgcggtacccatccatcatcactaatcaatttgtggccaaagctagtgtcttcattgtggtgcggaatgcgcttcttactgcacccattcctatcctcacttccctgctccattactgtggggaaaatgtcattgagaactgcatctgtgccaacttgtctgtgtccaggctctcctgtgataatttcacccttaacagaatctaccaatttgtggctggttggaccttgctgggctcagatttattcctcatcttcctctcttacaccttcattctaagagctgtgcttagattcaaagcagagggggcggcagtgaaggccctgagcacatgtggctcccacttcatcctcattcttttcttcagcaccatactgctggttgtggtgttgacaaacgtggccagaaagaaggtccccatggacatcctgatcctgctgaacgtccttcatcaccttattcctcctgcgttgaaccctattgtgtatggggttcggaccaaagagataaaacagggaattcagaagttactgcagagagggaggtga

SEQ ID NO: 124 - protein, 318 aa, Homo sapiens
MIQPMASPSNSSTVPVSEFLLTCFPNFQSWQHWLSLPLSLLFLLAMGANTTLLITIQLEASLHQPLYYLLSLLSLLDIVLCLTVIPKVLAIFWYDLRSISFPACFLQMFIMNSFLPMESCTFMVMAYDRYVAICHPLRYPSIITNQFVAKASVFIVVRNALLTAPIPILTSLLHYCGENVIENCICANLSVSRLSCDNFTLNRIYQFVAGWTLLGSDLFLIFLSYTFILRAVLRFKAEGAAVKALSTCGSHFILILFFSTILLVVVLTNVARKKVPMDILILLNVLHHLIPPALNPIVYGVRTKEIKQGIQKLLQRGR

SEQ ID NO: 125 - DNA, 786 bp, Homo sapiens
  CDS (1)..(786)
atgacattacccagcgatgactccactgtcccagtctctgaattcctcctcatctgcttccccaactttcagagttggcagcacttgctgtccctgcccctcagcctcatttcctcctggccatggggaccaacacccaccccccccatcaccatccacctggaggcctctctgcacctgcccctgtactacctgcccagcctcctctccctgctggacatcgtgctctgcctcaccgtcatccccaaggtcctggccatcttctggtttgatcttaggtcgatcggcttccctgcctgcttccttcagatgttcatcatgaacagtttcctccccatggagtcctgcacattcatggtcaaggactatgatcattatgtggccatctgccacccactgcagtacctgtccatcatcactcatcaatttgtggccaaagctagtgtcttcattgtggtgcagaatgctttgctgctttcacctgttcctattctctctgcccagctccattactgtaggaaaaatgtgattgagaactgcatctgtgccaacctgtctgtgtccaggctctcctgtgataatttcacccttaacagactctaccaatttgtggctggttggaccttcctgggctcggatttcatcctcatcttcctctcctacaccttcattctaagagctgtgcttagattcaaggtggagggggtggcagtgaaggccctgagcacatgtggctcccactttatcctcatcctcttcttcagcacctgctggttgtggtgttga

SEQ ID NO: 126 - protein, 261 aa, Homo sapiens
MTLPSDDSTVPVSEFLLICFPNFQSWQHLLSLPLSLISSWPWGPTPTPPITIHLEASLHLPLYYLPSLLSLLDIVLCLTVIPKVLAIFWFDLRSIGFPACFLQMFIMNSFLPMESCTFMVKDYDHYVAICHPLQYLSIITHQFVAKASVFIVVQNALLLSPVPILSAQLHYCRKNVIENCICANLSVSRLSCDNFTLNRLYQFVAGWTFLGSDFILIFLSYTFILRAVLRFKVEGVAVKALSTCGSHFILILFFSTCWLWC

SEQ ID NO: 127 - DNA, 939 bp, Homo sapiens
  CDS (1)..(939)
atggatgaagccaatcactctgtggtctctgagtttgtgttcctgggactctctgactcgcggaagatccagctcctcctcttcctctttttctcagtgttctatgtgtcaagcctgatgggaaatctcctcattgtgctaactgtgacctctgaccctcgtttacagtcccccatgtacttcctgctggccaacctttccatcatcaatttggtattttgttcctccacagctcccaagatgatttatgaccttttcaggaagcacaagaccatctcttttgggggctgtgtagttcagatcttctttatccatgcagttgggggaactgagatggtgctgctcatagccatggcttttgaccgatatgtggccatatgtaagcctctccactacctgaccatcatgaacccacaaaggtgcattttgtttttagtcatttcctggattataggtattattcactcagtgattcagttggcttttgttgtagacctgctgttctgtggccctaatgaattagatagtttcttttgtgatcttcctcgatttatcaaactggcttgcatagagacctacacattgggattcatggttactgccaatagtggatttatttctctggcttcttttttaattctcataatctcttacatctttattttggtgactgttcagaaaaaatcttcaggtggtatattcaaggctttctctatgctgtcagctcatgtcattgtggtggttttggtctttgggccattaatctttttctatatttttccatttcccacatcacatcttgataaattccttgccatctttgatgcagttatcactcccgttttgaatccagtcatctatacttttagaaataaagagatgatggtggcaatgagaagacgatgctctcagtttgtgaattacagtaaaatcttttaa

SEQ ID NO: 128 - protein, 312 aa, Homo sapiens
MDEANHSVVSEFVFLGLSDSRKIQLLLFLFFSVFYVSSLMGNLLIVLTVTSDPRLQSPMYFLLANLSIINLVFCSSTAPKMIYDLFRKHKTISFGGCVVQIFFIHAVGGTEMVLLIAMAFDRYVAICKPLHYLTIMNPQRCILFLVISWIIGIIHSVIQLAFVVDLLFCGPNELDSFFCDLPRFIKLACIETYTLGFMVTANSGFISLASFLILIISYIFILVTVQKKSSGGIFKAFSMLSAHVIVVVLVFGPLIFFYIFPFPTSHLDKFLAIFDAVITPVLNPVIYTFRNKEMMVAMRRRCSQFVNYSKIF

SEQ ID NO: 129 - DNA, 939 bp, Homo sapiens
  CDS (1)..(939)
atgtctgttctcaataactccgaagtcaagcttttccttctgattgggatcccaggactggaacatgcccacatttggttctccatccccatttgcctcatgtacctgcttgccatcatgggcaactgcaccattctctttattataaagacagagccctcgcttcatgagcccatgtattatttccttgccatgttggctgtctctgacatgggcctgtccctctcctcccttcctaccatgttgagggtcttcttgttcaatgccatgggaatttcacctaatgcctgctttgctcaagaattcttcattcatggattcactgtcatggaatcctcagtacttctaattatgtctttggaccgctttcttgccattcacaatcccttaagatacagttctatcctcactagcaacagggttgctaaaatgggacttattttagccattaggagcattctcttagtgattccatttcccttcaccttaaggagattaaaatattgtcaaaagaatcttctttctcactcatactgtcttcatcaggataccatgaagctggcctgctctgacaacaagaccaatgtcatctatggcttcttcattgctctctgtactatgctggacttggcactgattgttttgtcttatgtgctgatcttgaagactatactcagcattgcatctttggcagagaggcttaaggccctaaatacctgtgtctcccacatctgtgctgtgctcaccttctatgtgcccatcatcaccctggctgccatgcatcactttgccaagcacaaaagccctcttgttgtgatccttattgcagatatgttcttgttggtgccgccccttatgaaccccattgtgtactgtgtaaagactcgacaaatctgggagaagatcttggggaagttgcttaatgtatgtgggagataa

SEQ ID NO: 130 - protein, 312 aa, Homo sapiens
MSVLNNSEVKLFLLIGIPGLEHAHIWFSIPICLMYLLAIMGNCTILFIIKTEPSLHEPMYYFLAMLAVSDMGLSLSSLPTMLRVFLFNAMGISPNACFAQEFFIHGFTVMESSVLLIMSLDRFLAIHNPLRYSSILTSNRVAKMGLILAIRSILLVIPFPFTLRRLKYCQKNLLSHSYCLHQDTMKLACSDNKTNVIYGFFIALCTMLDLALIVLSYVLILKTILSIASLAERLKALNTCVSHICAVLTFYVPIITLAAMHHFAKHKSPLVVILIADMFLLVPPLMNPIVYCVKTRQIWEKILGKLLNVCGR

SEQ ID NO: 131 - DNA, 909 bp, Homo sapiens
  CDS (1)..(909)
atgacgaacttgaatgcatcacaggccaaccaccgtaacttcattctgacaggtatcccaggaacgccagacaagaacccatggttggcctttcccctgggatttctctacacactcacactcctgggaaatggtaccatcctagctgtcatcaaggtggagccaagtctccatgagcccacgtattacttcctttctatcttggctctcactgacgttagtctctccatgtccaccttgccctccatgctcagcatctactggtttaatgcccctcagattgtttttgatgcatgcatcatgcagatgttcttcatccatgtatttggaatagtagaatcaggagtcctagtgtccatggcctttgacagatttgtggccatccgaaacccattacactatgtttccatcctcactcacgatgttattcgaaagactggaatatctgtcctcacccgggcagtctgtgtggtattccctgtgcccttccttataaagtgcctacccttctgccattccaatgtcttgtctcattcatactgtcttcaccaaaacatgatgcggctagcttgtgccagcacccgcatcaacagcctctacggcctcatcgtcgtcatcttcacactggggctcgatgttctcctcactctactgtcttatgtactcaccctgaagactgtgctgggcattgtctccagaggtgaaaggctgaaaaccctcagcacatgcctctctcacatgtctaccgtgctcctcttctatgttccttttatgggtgctgcctccatgatccacagattttgggagcatttatcaccagtagtgcacatggtcatggctgatatatacctactgctcccgcctgtgctaaaccccattgtctacagtgtgaagaccaagcaaatttga

SEQ ID NO: 132 - protein, 302 aa, Homo sapiens
MTNLNASQANHRNFILTGIPGTPDKNPWLAFPLGFLYTLTLLGNGTILAVIKVEPSLHEPTYYFLSILALTDVSLSMSTLPSMLSIYWFNAPQIVFDACIMQMFFIHVFGIVESGVLVSMAFDRFVAIRNPLHYVSILTHDVIRKTGISVLTRAVCVVFPVPFLIKCLPFCHSNVLSHSYCLHQNMMRLACASTRINSLYGLIVVIFTLGLDVLLTLLSYVLTLKTVLGIVSRGERLKTLSTCLSHMSTVLLFYVPFMGAASMIHRFWEHLSPVVHMVMADIYLLLPPVLNPIVYSVKTKQI

SEQ ID NO: 133 - DNA, 765 bp, Homo sapiens
  CDS (1)..(765)
atgtacctctttctggccatgctggccatcactgacctggtcctctcctcctccactcaacctaagatgttggccatattctggtttcatgctcatgagattcagtaccatgcctgcctcatccaggtgttcttcatccatgccttttcttctgtggagtctggggtgctcatggctatggccctggactgctacgtggctacctgcttcccactccgacactctagcatcctgaccccatcggtcgtgatcaaactggggaccatcgtgatgctgagagggctgctgtgggtgagccccttctgcttcatggtgtctaggatgcccttctgccaacaccaagccattccccagtcatactgtgagcacatggctgtgctgaagttggtgtgtgctgatacaagcataagtcgtgggtatgggctctttgtggccttctctgtggctggctttgatatgattgtcattggtatgtcatacgtgatgattttgagagctgtgcttcagttgccctcaggtgaagcccgcctcaaagcttttagcacacgtgcctcccatatctgtgtcatcttggctctttatatcccagcccttttttctttcctcacctaccgctttggccatgatgtgccccgagttgtacacatcctgtttgctaatctctatctactgatacctcccatgctcaaccccatcatttatggagttagaaccaaacagatcggggacagggttatccaaggatgttgtggaaacatcccctga

SEQ ID NO: 134 - protein, 254 aa, Homo sapiens
MYLFLAMLAITDLVLSSSTQPKMLAIFWFHAHEIQYHACLIQVFFIHAFSSVESGVLMAMALDCYVATCFPLRHSSILTPSVVIKLGTIVMLRGLLWVSPFCFMVSRMPFCQHQAIPQSYCEHMAVLKLVCADTSISRGYGLFVAFSVAGFDMIVIGMSYVMILRAVLQLPSGEARLKAFSTRASHICVILALYIPALFSFLTYRFGHDVPRVVHILFANLYLLIPPMLNPIIYGVRTKQIGDRVIQGCCGNIP

SEQ ID NO: 135 - DNA, 972 bp, Homo sapiens
  CDS (1)..(972)
atgtcaacattaccaactcagatagcccccaatagcagcacttcaatggcccccaccttcttgctggtgggcatgccaggcctatcaggtgcaccctcctggtggacattgcccctcattgctgtctaccttctctctgcactgggaaatggcaccatcctctggatcattgccctgcagcccgccctgcaccgcccaatgcacttcttcctcttcttgcttagtgtgtctgatattggattggtcactgccctgatgcccacactgctgggcatcgcccttgctggtgctcacactgtccctgcctcagcctgccttctacagatggtttttatccatgtcttttctgtcatggagtcctctgtcttgctcgccatgtccattgatcgggcactggccatctgccgacctctccactacccagcgctcctcaccaatggtgtaattagcaaaatcagcctggccatttcttttcgatgcctgggtctccatctgcccctgccattcctgctggcctacatgccctactgcctcccacaggtcctaacccattcttattgcttgcatccagatgtggctcgtttggcctgcccagaagcttggggtgcagcctacagcctatttgtggttctttcagccatgggtttggaccccctgcttattttcttctcctatggcctgattggcaaggtgttgcaaggtgtggagtccagagaggatcgctggaaggctggtcaaacctgtgctgcccacctctctgcagtgctcctcttctatatccctatgatcctcctggcactgattaaccatcctgagctgccaatcactcagcatacccatactcttctatcctatgtccatttccttcttcctccattgataaaccctattctctatagtgtcaagatgaaggagattagaaagagaatactcaacaggttgcagcccaggaaggtgggtggtgctcagtga

SEQ ID NO: 136 - protein, 323 aa, Homo sapiens
MSTLPTQIAPNSSTSMAPTFLLVGMPGLSGAPSWWTLPLIAVYLLSALGNGTILWIIALQPALHRPMHFFLFLLSVSDIGLVTALMPTLLGIALAGAHTVPASACLLQMVFIHVFSVMESSVLLAMSIDRALAICRPLHYPALLTNGVISKISLAISFRCLGLHLPLPFLLAYMPYCLPQVLTHSYCLHPDVARLACPEAWGAAYSLFVVLSAMGLDPLLIFFSYGLIGKVLQGVESREDRWKAGQTCAAHLSAVLLFYIPMILLALINHPELPITQHTHTLLSYVHFLLPPLINPILYSVKMKEIRKRILNRLQPRKVGGAQ

SEQ ID NO: 137 - DNA, 1065 bp, Homo sapiens
  CDS (1)..(1065)
atgactaataaaatgtatgctatatatataaagaatcttaattatttttctttcctcatagttcagtgtcttcaaccaaccatggcaatattcaataacaccacttcgtcttcctcaaacttcctcctcactgcattccctgggctggaatgtgctcatgtctggatctccattccagtctgctgtctctacaccattgccctcttgggaaacagtatgatctttcttgtcatcattactaagcggagactccacaaacccatgtattatttcctctccatgctggcagctgttgatctatgtctgaccattacgacccttcccactgtgcttggtgttctctggtttcatgcccgggagatcagctttaaagcttgcttcattcaaatgttctttgtgcatgctttctccttgctggagtcctcggtgctggtagccatggcctttgaccgcttcgtggctatctgtaacccactgaactatgctactatcctcacagacaggatggtcctggtgatagggctggtcatctgcattagaccagcagttttcttacttccccttcttgtagccataaacactgtgtcttttcatgggggtcacgagctttcccatccattttgctaccacccagaagtgatcaaatacacatattccaaaccttggatcagcagtttttggggactgtttcttcagctctacctgaatggcactgacgtattgtttattcttttctcctatgtcctgatcctccgtactgttctgggcattgtggcccgaaagaagcaacaaaaagctctcagcacttgtgtctgtcacatctgtgcagtcactattttctatgtgccactgatcagcctctctttggcacaccgcctcttccactccaccccaagggtgctctgtagcactttggccaatatttatctgctcttaccacctgtgctgaaccctatcatttacagcttgaagaccaagacaatccgccaggctatgttccagctgctccaatccaagggttcatggggttttaatgtgaggggtcttaggggaagatgggattga

SEQ ID NO: 138 - protein, 354 aa, Homo sapiens
MTNKMYAIYIKNLNYFSFLIVQCLQPTMAIFNNTTSSSSNFLLTAFPGLECAHVWISIPVCCLYTIALLGNSMIFLVIITKRRLHKPMYYFLSMLAAVDLCLTITTLPTVLGVLWFHAREISFKACFIQMFFVHAFSLLESSVLVAMAFDRFVAICNPLNYATILTDRMVLVIGLVICIRPAVFLLPLLVAINTVSFHGGHELSHPFCYHPEVIKYTYSKPWISSFWGLFLQLYLNGTDVLFILFSYVLILRTVLGIVARKKQQKALSTCVCHICAVTIFYVPLISLSLAHRLFHSTPRVLCSTLANIYLLLPPVLNPIIYSLKTKTIRQAMFQLLQSKGSWGFNVRGLRGRWD

SEQ ID NO: 139 - DNA, 942 bp, Homo sapiens
  CDS (1)..(942)
atgtccattatcaacacatcatatgttgaaatcaccaccttcttcttggttgggatgccagggctagaatatgcacacatctggatctctatccccatctgcagcatgtatcttattgctattctaggaaattgcaccattctttttatcatcaagacagagccctccttgcatgagcccatgtactattttctttccatgttggctatgtcagacttgggtttgtctttatcatctctgcccactgtgttaagcatcttcctgttcaatgctcctgaaatttcatccaatgcctgctttgcccaggaattcttcattcatggattctcagtactggagtcctcagtcctcctgatcatgtcatttgatagattcctagccatccacaaccctctgagatacacctcaatcctgacaactgtcagagttgcccaaatagggatagtattctcctttaagagcatgctcctggttcttcccttccctttcactttaagaaacttgagatattgcaagaaaaaccaattatcccattcctactgtctccaccaggatgtcatgaagttggcctgttctgacaacagaattgatgttatctatggcttttttggagcactctgccttatggtagactttattctcattgctgtgtcttacaccctgatcctcaagactgtaccgggaattgcatccaaaaaggagcagcttaaggctctcaatacttgtgtttcacacatctgtgcagtgatcatcttctacctgcccatcatcaacctggccgttgtccaccgctttgcccggcatgtctctcccctcattaatgttctcatggcaaatgttctcctacttgtacctccactgatgaacccaattgtttattgtgtaaaaactaaacagattagagtgagagttgtagcaaaattgtgtcaacggaagatttaa

SEQ ID NO: 140 - protein, 313 aa, Homo sapiens [sequence omitted]

SEQ ID NO: 141 - DNA, 945 bp, Homo sapiens
  CDS (1)..(945)
atgaccctgggatccctgggaaacagcagcagcagcgtttctgctaccttcctgctgagtggcatccctgggctggagcgcatgcacatctggatctccatcccactgtgcttcatgtatctggtttccatcccgggcaactgcacaattctttttatcattaaaacagagcgctcacttcatgaacctatgtatctcttcctgtccatgctggctctgattgacctgggtctctccctttgcactctccctacagtcctgggcatcttttgggttggagcacgagaaattagccatgatgcctgctttgctcagctctttttcattcactgcttctccttcctcgagtcctctgtgctactgtctatggcctttgaccgctttgtggctatctgccaccccttgcactatgtttccattctcaccaacacagtcattggcaggattggcctggtctctctgggtcgtagtgtagcactcatttttccattaccttttatgctcaaaagattcccctattgtggctccccagttctctcacattcttattgtctccaccaagaagtgatgaaattggcctgtgccgacatgaaggccaacagcatctacggcatgtttgtcatcgtctctacagtgggtatagactcactgctcatcctcttctcttatgctctgatcctgcgcaccgtgctgtccatcgcctccagggctgagagattcaaggcccttaacacctgtgtttcccacatctgtgctgtgctgctcttctacactcccatgattggcctctctgtcatccatcgctttggaaagcaggcaccccacctggtccaggtggtcatgggtttcatgtatcttctctttcctcctgtgatgaatcccattgtctacagtgtgaagaccaaacagatccgggatcgagtgacgcatgccttttgttactaa

SEQ ID NO: 142 - protein, 314 aa, Homo sapiens
MTLGSLGNSSSSVSATFLLSGIPGLERMHIWISIPLCFMYLVSIPGNCTILFIIKTERSLHEPMYLFLSMLALIDLGLSLCTLPTVLGIFWVGAREISHDACFAQLFFIHCFSFLESSVLLSMAFDRFVAICHPLHYVSILTNTVIGRIGLVSLGRSVALIFPLPFMLKRFPYCGSPVLSHSYCLHQEVMKLACADMKANSIYGMFVIVSTVGIDSLLILFSYALILRTVLSIASRAERFKALNTCVSHICAVLLFYTPMIGLSVIHRFGKQAPHLVQVVMGFMYLLFPPVMNPIVYSVKTKQIRDRVTHAFCY

SEQ ID NO: 143 - DNA, 966 bp, Homo sapiens
  CDS (1)..(966)
atgacaattcttcttaatagcagcctccaaagagccactttcttcctgacgggcttccaaggtctagaaggtctccatggctggatctctattcccttctgcttcatctacctgacagttatcttggggaacctcaccattctccacgtcatttgtactgatgccactctccatggacccatgtactatttcttgggcatgctagctgtcacagacttaggcctttgcctttccacactgcccactgtgctgggcattttctggtttgataccagagagattggcatccctgcctgtttcactcagctcttcttcatccacaccttgtcttcaatggagtcatcagttctgttatccatgtccattgaccgctccgtggccgtctgcaacccactgcatgactccaccgtcctgacacctgcatgtattgtcaagatggggctaagctcagtgcttagaagtgctctcctcatcctccccttgccattcctcctgaagcgcttccaatactgccactcccatgtgctggctcatgcttattgtcttcacctggagatcatgaagctggcctgctctagcatcattgtcaatcacatctatgggctctttgttgtggcctgcaccgtgggtgtggactccctgctcatctttctctcatacgccctcatccttcgcaccgtgctcagcattgcctcccaccaggagcgactccgagccctcaacacctgtgtctctcatatctgtgctgtactgctcttctacatccccatgattggcttgtctcttgtgcatcgctttggtgaacatctgccccgcgttgtacacctcttcatgtcctatgtgtatctgctggtaccaccccttatgaaccccatcatctacagcatcaagaccaagcaaattcgccagcgcatcattaagaagtttcagtttataaagtcacttaggtgtttttggaaggattaa

SEQ ID NO: 144 - protein, 321 aa, Homo sapiens
MTILLNSSLQRATFFLTGFQGLEGLHGWISIPFCFIYLTVILGNLTILHVICTDATLHGPMYYFLGMLAVTDLGLCLSTLPTVLGIFWFDTREIGIPACFTQLFFIHTLSSMESSVLLSMSIDRSVAVCNPLHDSTVLTPACIVKMGLSSVLRSALLILPLPFLLKRFQYCHSHVLAHAYCLHLEIMKLACSSIIVNHIYGLFVVACTVGVDSLLIFLSYALILRTVLSIASHQERLRALNTCVSHICAVLLFYIPMIGLSLVHRFGEHLPRVVHLFMSYVYLLVPPLMNPIIYSIKTKQIRQRIIKKFQFIKSLRCFWKD

SEQ ID NO: 145 - DNA, 765 bp, Homo sapiens
  CDS (1)..(765)
atgtactatttcctctccatgctgtccgccactgacctcggcctgtccatatccactctggtcaccatgctgagtatattctggttcaatgtgagggaaatcagctttaatgcctgcttgtcccacatgttctttattaaattcttcactgtcatggaatcctcagtgctgttggccatggcttttgatcgttttgtggccgtctctaatccccttaggtatgccatgattttaactgactccagaatagctcaaattggagtggcaagtgtcatcagggggctcctaatgctgacaccaatggtagcacttcttataagactttcctactgccacagccaagtactccaccactcctactgctaccaccctgatgtgatgaagctctcatgcacagacaccagaatcaacagtgcagttgggctgactgccatgttctctactgttggtgtagacttacttctcatcctcctttcttatgttttgatcattaggactgtccttagcgttgcttccccagaagagaggaaggaaaccttcagtacatgtgtctcccacattgtggcttttgctatatattacattccattgatcagtctgtccattgttcacagatttgggaaacaagccccagcctatgtacatactatgattgctaacacctacctgctgatctcccctttgatgaaccctgtcatctacagtgtgaaaaccaaacagatacgtagagctgtgataaaaattctccattccaaagaaacataa

SEQ ID NO: 146 - protein, 254 aa, Homo sapiens
MYYFLSMLSATDLGLSISTLVTMLSIFWFNVREISFNACLSHMFFIKFFTVMESSVLLAMAFDRFVAVSNPLRYAMILTDSRIAQIGVASVIRGLLMLTPMVALLIRLSYCHSQVLHHSYCYHPDVMKLSCTDTRINSAVGLTAMFSTVGVDLLLILLSYVLIIRTVLSVASPEERKETFSTCVSHIVAFAIYYIPLISLSIVHRFGKQAPAYVHTMIANTYLLISPLMNPVIYSVKTKQIRRAVIKILHSKET

SEQ ID NO: 147 - DNA, 612 bp, Homo sapiens
  CDS (1)..(612)
atgaatgtctttctactgacaggcatcctggcaatgtcctcctatctactcagattgaagaactcacatctctccagagccttcggctgcctccctaggatgctcccttcccagacctatgtcaacatctccttcttccaaccgcctgctcttctcatgattggcatcccagggctggaggcggttcatggctggctcgccatccccttctcctccatgtacactgtggccctccctgggaactgcctgatcctcctggctgtgaagaggaaccccagcctgcaccagcccatgtgctacttcctgtccatgctggcgctccccaaagcgggcctcaccttgtccacactgcccatcaccttggctgtgctctggtttgaccaccggctcatgggcttcaatgcctgcctggtccagatgttcttcctgcactcctctgtggtggagtcctcagtgctcctggccatatcctttgaccactttgtggccatctccaaccccctgcactatgcagctgtcctcacaaatagtgtcatcatcaggattgggctggccattgtggctcaagttaccttgtgcctcttcctgtgccatttccggttaagagtctaa

SEQ ID NO: 148 - protein, 203 aa, Homo sapiens [sequence omitted]

SEQ ID NO: 149 - DNA, 975 bp, Homo sapiens
  CDS (1)..(975)
atgctgggtccagcttacaaccacacaatggaaacccctgcctccttcctccttgtgggtatcccaggactgcaatcttcacatctttggctggctatctcactgagtgccatgtacatcacagccctgttaggaaacaccctcatcgtgactgcaatctggatggattccactcggcatgagcccatgtattgctttctgtgtgttctggctgctgtggacattgttatggcctcctccgtggtacccaagatggtgagcatcttctgctcgggagacagctccatcagctttagtgcttgtttcactcagatgttttttgtccacttagccacagctgtggagacggggctgctgctgaccatggcttttgaccgctatgtagccatctgcaagcctctacactacaagagaattctcacgcctcaagtgatgctgggaatgagtatggccgtcaccatcagagctgtcacattcatgactccactgagttggatgatgaatcatctacctttctgtggctccaatgtggttgtccactcctactgtaagcacatagctttggccaggttagcatgtgctgaccccgtgcccagcagtctctacagtctgattggttcctctcttatggtgggctctgatgtggccttcattgctgcctcctatatcttaattctcagggcagtatttgatctctcctcaaagactgctcagttgaaagcattaagcacatgtggctcccatgtgggggttatggctttgtactatctacctgggatggcatccatctatgcggcctggttggggcaggatatagtgcccttgcacacccaagtgctgctagctgacctgtacgtgatcatcccagccactttaaatcccatcatctatggcatgaggaccaaacaattgctggagggaatatggagttatctgatgcacttcctctttgaccactccaacctgggttcatga

SEQ ID NO: 150 - protein, 324 aa, Homo sapiens
MLGPAYNHTMETPASFLLVGIPGLQSSHLWLAISLSAMYITALLGNTLIVTAIWMDSTRHEPMYCFLCVLAAVDIVMASSVVPKMVSIFCSGDSSISFSACFTQMFFVHLATAVETGLLLTMAFDRYVAICKPLHYKRILTPQVMLGMSMAVTIRAVTFMTPLSWMMNHLPFCGSNVVVHSYCKHIALARLACADPVPSSLYSLIGSSLMVGSDVAFIAASYILILRAVFDLSSKTAQLKALSTCGSHVGVMALYYLPGMASIYAAWLGQDIVPLHTQVLLADLYVIIPATLNPIIYGMRTKQLLEGIWSYLMHFLFDHSNLGS

SEQ ID NO: 151 - DNA, 963 bp, Homo sapiens
  CDS (1)..(963)
atgagttcctgcaacttcacacatgccacctttgtgcttattggtatcccaggattagagaaagcccatttctgggttggcttccccctcctttccatgtatgtagtggcaatgtttggaaactgcatcgtggtcttcatcgtaaggacggaacgcagcctgcacgctccgatgtacctctttctctgcatgcttgcagccattgacctggccttatccacatccaccatgcctaagatccttgcccttttctggtttgattcccgagagattagctttgaggcctgtcttacccagatgttctttattcatgccctctcagccattgaatccaccatcctgctggccatggcctttgaccgttatgtggccatctgccacccactgcgccatgctgcagtgctcaacaatacagtaacagcccagattggcatcgtggctgtggtccgcggatccctcttttttttcccactgcctctgctgatcaagcggctggccttctgccactccaatgtcctctcgcactcctattgtgtccaccaggatgtaatgaagttggcctatgcagacactttgcccaatgtggtatatggtcttactgccattctgctggtcatgggcgtggacgtaatgttcatctccttgtcctattttctgataatacgaacggttctgcaactgccttccaagtcagagcgggccaaggcctttggaacctgtgtgtcacacattggtgtggtactcgccttctatgtgccacttattggcctctcagtggtacaccgctttggaaacagccttcatcccattgtgcgtgttgtcatgggtgacatctacctgctgctgcctcctgtcatcaatcccatcatctatggtgccaaaaccaaacagatcagaacacgggtgctggctatgttcaagatcagctgtgacaaggacttgcaggctgtgggaggcaagtga

SEQ ID NO: 152 - protein, 320 aa, Homo sapiens
MSSCNFTHATFVLIGIPGLEKAHFWVGFPLLSMYVVAMFGNCIVVFIVRTERSLHAPMYLFLCMLAAIDLALSTSTMPKILALFWFDSREISFEACLTQMFFIHALSAIESTILLAMAFDRYVAICHPLRHAAVLNNTVTAQIGIVAVVRGSLFFFPLPLLIKRLAFCHSNVLSHSYCVHQDVMKLAYADTLPNVVYGLTAILLVMGVDVMFISLSYFLIIRTVLQLPSKSERAKAFGTCVSHIGVVLAFYVPLIGLSVVHRFGNSLHPIVRVVMGDIYLLLPPVINPIIYGAKTKQIRTRVLAMFKISCDKDLQAVGGK

SEQ ID NO: 153 - DNA, 954 bp, Homo sapiens
  CDS (1)..(954)
atgctcacttttcataatgtctgctcagtacccagctccttctggctcactggcatcccagggctggagtccctacacgtctggctctccatcccctttggctccatgtacctggtggctgtggtggggaatgtgaccatcctggctgtggtaaagatagaacgcagcctgcaccagcccatgtactttttcttgtgcatgttggctgccattgacctggttctgtctacttccactatacccaaacttctgggaatcttctggttcggtgcttgtgacattggcctggacgcctgcttgggccaaatgttccttatccactgctttgccactgttgagtcaggcatcttccttgccatggcttttgatcgctacgtggccatctgcaacccactacgtcatagcatggtgctcacttatacagtggtgggtcgtttggggcttgtttctctcctccggggtgttctctacattggacctctgcctctgatgatccgcctgcggctgcccctttataaaacccatgttatctcccactcctactgtgagcacatggctgtagttgccttgacatgtggcgacagcagggtcaataatgtctatgggctgagcatcggctttctggtgttgatcctggactcagtggctattgctgcatcctatgtgatgattttcagggccgtgatggggttagccactcctgaggctaggcttaaaaccctggggacatgcgcttctcacctctgtgccatcctgatcttttatgttcccattgctgtttcttccctgattcaccgatttggtcagtgtgtgcctcctccagtccacactctgctggccaacttctatctcctcattcctccaatcctcaatcccattgtctatgctgttcgcaccaagcagatccgagagagccttctccaaataccaaggatagaaatgaagattagatga

SEQ ID NO: 154 - protein, 317 aa, Homo sapiens
MLTFHNVCSVPSSFWLTGIPGLESLHVWLSIPFGSMYLVAVVGNVTILAVVKIERSLHQPMYFFLCMLAAIDLVLSTSTIPKLLGIFWFGACDIGLDACLGQMFLIHCFATVESGIFLAMAFDRYVAICNPLRHSMVLTYTVVGRLGLVSLLRGVLYIGPLPLMIRLRLPLYKTHVISHSYCEHMAVVALTCGDSRVNNVYGLSIGFLVLILDSVAIAASYVMIFRAVMGLATPEARLKTLGTCASHLCAILIFYVPIAVSSLIHRFGQCVPPPVHTLLANFYLLIPPILNPIVYAVRTKQIRESLLQIPRIEMKIR

SEQ ID NO: 155 - DNA, 975 bp, Homo sapiens
  CDS (1)..(975)
atgcagaagccccagctcttggtccctatcatagccacttcaaatggaaatctggtccacgcagcatacttccttttggtgggtatccctggcctggggcctaccatacacttttggctggctttcccactgtgttttatgtatgccttggccaccctgggtaacctgaccattgtcctcatcattcgtgtggagaggcgactgcatgagcccatgtacctcttcctggccatgctttccactattgacctagtcctctcctctatcaccatgcccaagatggccagtcttttcctgatgggcatccaggagatcgagttcaacatttgcctggcccagatgttccttatccatgctctgtcagccgtggagtcagctgtcctgctggccatggcttttgaccgctttgtggccatttgccacccattgcgccatgcttctgtgctgacagggtgtactgtggccaagattggactatctgccctgaccagggggtttgtattcttcttcccactgcccttcatcctcaagtggttgtcctactgccaaacacatactgtcacacactccttctgtctgcaccaagatattatgaagctgtcctgtactgacaccagggtcaatgtggtttatggactcttcatcatcctctcagtcatgggtgtggactctctcttcattggcttctcatatatcctcatcctgtgggctgttttggagctgtcctctcggagggcagcactcaaggctttcaacacctgcatctcccacctctgtgctgttctggtcttctatgtacccctcattgggctctcggtggtgcataggctgggtggtcccacctccctcctccatgtggttatggctaatacctacttgctgctaccacctgtagtcaacccccttgtctatggagccaagaccaaagagatctgttcaagggtcctctgtatgttctcacaaggtggcaagtga

SEQ ID NO: 156 - protein, 324 aa, Homo sapiens
MQKPQLLVPIIATSNGNLVHAAYFLLVGIPGLGPTIHFWLAFPLCFMYALATLGNLTIVLIIRVERRLHEPMYLFLAMLSTIDLVLSSITMPKMASLFLMGIQEIEFNICLAQMFLIHALSAVESAVLLAMAFDRFVAICHPLRHASVLTGCTVAKIGLSALTRGFVFFFPLPFILKWLSYCQTHTVTHSFCLHQDIMKLSCTDTRVNVVYGLFIILSVMGVDSLFIGFSYILILWAVLELSSRRAALKAFNTCISHLCAVLVFYVPLIGLSVVHRLGGPTSLLHVVMANTYLLLPPVVNPLVYGAKTKEICSRVLCMFSQGGK

SEQ ID NO: 157 - DNA, 957 bp, Homo sapiens
  CDS (1)..(957)
atgatggtggatcccaatggcaatgaatccagtgctacatacttcatcctaataggcctccctggtttagaagaggctcagttctggttggccttcccattgtgctccctctaccttattgctgtgctaggtaacttgacaatcatctacattgtgcggactgagcacagcctgcatgagcccatgtatatatttctttgcatgctttcaggcattgacatcctcatctccacctcatccatgcccaaaatgctggccatcttctggttcaattccactaccatccagtttgatgcttgtctgctacagatgtttgccatccactccttatctggcatggaatccacagtgctgctggccatggcttttgaccgctatgtggccatctgtcacccactgcgccatgccacagtacttacgttgcctcgtgtcaccaaaattggtgtggctgctgtggtgcggggggctgcactgatggcaccccttcctgtcttcatcaagcagctgcccttctgccgctccaatatcctttcccattcctactgcctacaccaagatgtcatgaagctggcctgtgatgatatccgggtcaatgtcgtctatggccttatcgtcatcatctccgccattggcctggactcacttctcatctccttctcatatctgcttattcttaagactgtgttgggcttgacacgtgaagcccaggccaaggcatttggcacttgcgtctctcatgtgtgtgctgtgttcatattctatgtacctttcattggattgtccatggtgcatcgctttagcaagcggcgtgactctccgctgcccgtcatcttggccaatatctatctgctggttcctcctgtgctcaacccaattgtctatggagtgaagacaaaggagattcgacagcgcatccttcgacttttccatgtggccacacacgcttcagagccctag

SEQ ID NO: 158 - protein, 318 aa, Homo sapiens
MMVDPNGNESSATYFILIGLPGLEEAQFWLAFPLCSLYLIAVLGNLTIIYIVRTEHSLHEPMYIFLCMLSGIDILISTSSMPKMLAIFWFNSTTIQFDACLLQMFAIHSLSGMESTVLLAMAFDRYVAICHPLRHATVLTLPRVTKIGVAAVVRGAALMAPLPVFIKQLPFCRSNILSHSYCLHQDVMKLACDDIRVNVVYGLIVIISAIGLDSLLISFSYLLILKTVLGLTREAQAKAFGTCVSHVCAVFIFYVPFIGLSMVHRFSKRRDSPLPVILANIYLLVPPVLNPIVYGVKTKEIRQRILRLFHVATHASEP

SEQ ID NO: 159 - DNA, 945 bp, Homo sapiens
  CDS (1)..(945)
atgcttccctctaatatcacctcaacacatccagctgtctttttgttggtaggaattcctggtttggaacacctgcatgcctggatctccatccccttctgctttgcttatactctggccctgctaggcaactgtacccttctcttcattatccaggctgatgcagccctccatgaacccatgtacctctttctggccatgttggcaaccattgacttggttctttcttctacaacgctgcccaaaatgcttgccatattctggttcagggatcaggagatcaacttctttgcctgtctggtccagatgttcttccttcactccttctccatcatggagtcagcagtgctgctggccatggcctttgaccgctatgtggccatctgcaagccattgcactacacgacggtcctgactgggtccctcatcaccaagattggcatggctgctgtggcccgggctgtgacactaatgactccactccccttcctgctcagacgcttccactactgccgaggcccagtgattgcccattgctactgtgaacacatggctgtggtaaggctggcgtgtggggacactagcttcaacaatatctatggcattgctgtggccatgtttagtgtggtgttggacctgctctttgttatcctgtcttatgtcttcatccttcaggcagttctccagcttgcctctcaggaggcccgctacaaagcatttgggacatgtgtgtctcacataggtgccatcctgtccacctacactccagtagtcatctcttcagtcatgcaccgtgtagcccgccatgctgcccctcgtgtccacatactccttgctattttctatctccttttcccacccatggtcaatcctatcatatatggagtcaagaccaagcagattcgtgagtatgtgctcagtctattccagagaaagaacatgtag

SEQ ID NO: 160 - protein, 314 aa, Homo sapiens
MLPSNITSTHPAVFLLVGIPGLEHLHAWISIPFCFAYTLALLGNCTLLFIIQADAALHEPMYLFLAMLATIDLVLSSTTLPKMLAIFWFRDQEINFFACLVQMFFLHSFSIMESAVLLAMAFDRYVAICKPLHYTTVLTGSLITKIGMAAVARAVTLMTPLPFLLRRFHYCRGPVIAHCYCEHMAVVRLACGDTSFNNIYGIAVAMFSVVLDLLFVILSYVFILQAVLQLASQEARYKAFGTCVSHIGAILSTYTPVVISSVMHRVARHAAPRVHILLAIFYLLFPPMVNPIIYGVKTKQIREYVLSLFQRKNM

SEQ ID NO: 161 - DNA, 945 bp, Homo sapiens
  CDS (1)..(945)
atgtcagcctccaatatcaccttaacacatccaactgccttcttgttggtggggattccaggcctggaacacctgcacatctggatctccatccctttctgcttagcatatacactggccctgcttggaaactgcactctccttctcatcatccaggctgatgcagccctccatgaacccatgtacctctttctggccatgttggcagccatcgacctggtcctttcctcctcagcactgcccaaaatgcttgccatattctggttcagggatcgggagataaacttctttgcctgtctggcccagatgttcttccttcactccttctccatcatggagtcagcagtgctgctggccatggcctttgaccgctatgtggctatctgcaagccactgcactacaccaaggtcctgactgggtccctcatcaccaagattggcatggctgctgtggcccgggctgtgacactaatgactccactccccttcctgctgagatgtttccactactgccgaggcccagtgatcgctcactgctactgtgaacacatggctgtggtgaggctggcgtgtggggacactagcttcaacaatatctatggcatcgctgtggccatgtttattgtggtgttggacctgctccttgttatcctgtcttatatctttattcttcaggcagttctactgcttgcctctcaggaggcccgctacaaggcatttgggacatgtgtctctcatataggtgccatcttagccttctacacaactgtggtcatctcttcagtcatgcaccgtgtagcccgccatgctgcccctcatgtccacatcctccttgccaatttctatctgctcttcccacccatggtcaatcccataatctatggtgtcaagaccaagcaaatccgtgagagcatcttgggagtattcccaagaaaggatatgtag

SEQ ID NO: 162 - protein, 314 aa, Homo sapiens
MSASNITLTHPTAFLLVGIPGLEHLHIWISIPFCLAYTLALLGNCTLLLIIQADAALHEPMYLFLAMLAAIDLVLSSSALPKMLAIFWFRDREINFFACLAQMFFLHSFSIMESAVLLAMAFDRYVAICKPLHYTKVLTGSLITKIGMAAVARAVTLMTPLPFLLRCFHYCRGPVIAHCYCEHMAVVRLACGDTSFNNIYGIAVAMFIVVLDLLLVILSYIFILQAVLLLASQEARYKAFGTCVSHIGAILAFYTTVVISSVMHRVARHAAPHVHILLANFYLLFPPMVNPIIYGVKTKQIRESILGVFPRKDM

SEQ ID NO: 163 - DNA, 963 bp, Homo sapiens
  CDS (1)..(963)
atggcagaaactctacaactcaattccaccttcctacacccaaacttcttcatactgactggctttccagggctaggaagtgcccagacttggctgacactggtctttgggcccatttatctgctggccctgctgggcaatggagcactgccggcagtggtgtggatagactccacactgcaccagcccatgtttctactgttggccatcctggcagccacagacctgggcttagccacatctatagccccagggttgctggctgtgctgtggcttgggccccgatctgtgccatatgctgtgtgcctggtccagatgttctttgtacatgcactgactgccatggaatcaggtgtgcttttggccatggcctgtgatcgtgctgcggcaatagggcgtccactgcactaccctgtcctggtcaccaaagcctgtgtgggttatgcagccttggccctggcactgaaagctgtggctattgttgtacctttcccactgctggtggcaaagtttgagcacttccaagccaagaccataggccatacctattgtgcacacatggcagtggtagaactggtggtgggtaacacacaggccaccaacttatatggtctggcactttcactggccatctcaggtatggatattctgggtatcactggctcctatggactcattgcccatgctgtgctgcagctacctacccgggaggcccatgccaaggcctttggtacatgtagttctcacatctgtgtcattctggccttctacatacctggtctcttctcctacctcacacaccgctttggtcatcacactgtcccaaagcctgtgcacatccttctctccaacatctacttgctgctgccacctgccctcaaccccctcatctatggggcccgcaccaagcagatcagagaccgactcctggaaaccttcacattcagaaaaagcccgttgtaa

SEQ ID NO: 164 - protein, 320 aa, Homo sapiens
MAETLQLNSTFLHPNFFILTGFPGLGSAQTWLTLVFGPIYLLALLGNGALPAVVWIDSTLHQPMFLLLAILAATDLGLATSIAPGLLAVLWLGPRSVPYAVCLVQMFFVHALTAMESGVLLAMACDRAAAIGRPLHYPVLVTKACVGYAALALALKAVAIVVPFPLLVAKFEHFQAKTIGHTYCAHMAVVELVVGNTQATNLYGLALSLAISGMDILGITGSYGLIAHAVLQLPTREAHAKAFGTCSSHICVILAFYIPGLFSYLTHRFGHHTVPKPVHILLSNIYLLLPPALNPLIYGARTKQIRDRLLETFTFRKSPL

SEQ ID NO: 165 - DNA, 813 bp, Homo sapiens
  CDS (1)..(813)
atgttctttagtcttcatagagagactccaaaagaaggcatgtttggtgctaatctcaccaccttccatcccactctattcattctccttggcatcccaggactggagcaataccacatctggctttccattcctttctaccttatgtacatcactgcagtcttgggaaatggagccctcatcctagttgtcctcagtgaacacaccctccatgtcttcctatccatgctggctggcactgatatcctgctatccaccaccactgtgcctaaggccttggcgatcttctgggtccacgctggggagatagcctttgatgcctgcattactcagatgtttttcattcatgttgcctttgtggctgagtcaggaatcctgctggccatggcatttgacagttatgtagccatttgtactcccttgagatacactaccatcttaacttctatggtaaatggaaaaatgaccctgacaatctggggacaaagcattgggacaatttttcctgtcatattcctgctgaagaggctgccatactgtcagaccaatatcatcccccactcatactgtgagcacattggggtggcccaattggcctgtgctgacataactgtcaatatctggtatggcttttcagtgccaatggcatcggttttggtagatgttgcattcattggtttttcctacactttgatcctccaggctgtgtttagacttccttcccaggagtcccagcacaaagctcttaacacctgtggttctacattggagttgttctcctcttcttcatcccatcattttttactttcctga

SEQ ID NO: 166 - protein, 270 aa, Homo sapiens
MFFSLHRETPKEGMFGANLTTFHPTLFILLGIPGLEQYHIWLSIPFYLMYITAVLGNGALILVVLSEHTLHVFLSMLAGTDILLSTTTVPKALAIFWVHAGEIAFDACITQMFFIHVAFVAESGILLAMAFDSYVAICTPLRYTTILTSMVNGKMTLTIWGQSIGTIFPVIFLLKRLPYCQTNIIPHSYCEHIGVAQLACADITVNIWYGFSVPMASVLVDVAFIGFSYTLILQAVFRLPSQESQHKALNTCGSTLELFSSSSSHHFLLS

SEQ ID NO: 167 - DNA, 960 bp, Homo sapiens
  CDS (1)..(960)
atggatacctccaccagtgttacctatgactccagcctccagatttcccagttcatcctgatgggattaccaggcattcatgagtggcagcactggctctccctgcccctgactctgctctacctcttagctcttggtgccaacctcctcatcataatcaccattcaacatgagaccgtgctacatgaacccatgtaccatttgctgggcatattagcagtggtggacattggcctggccaccaccatcatgcccaagatcctggccatcttctggtttgatgccaaggccattagcctccccatgtgttttgctcagatctatgccatccactgcttcttctgcatagagtcaggcatctttctctgcatggcagtagacagatacatagccatctgtcgccctcttcagtacccctccatagtcactaaagcttttgtcttcaaagccacagggttcatcatgctcaggaatggcctgttgaccatcccagtgcctatactggctgcccagagacactactgttccaggaatgaaatcgagcactgcctctgctctaacttgggggttatcagcctggcttgtgatgacatcactgtgaacaaattttaccaactgatgctagcatgggtcttggttgggagtgatatggctctggtattttcttcctatgctgtaatccttcactctgtgctgaggctgaactcagcagaagcaatgtccaaggctctgagcacttgtagctcccacctcatcctcatcctcttccacacaggtatcattgtgctgtctgtcacacaccttgcagagaaaaagattccccttattcctgtgttccttaatgtgctgcacaatgtcatcccccctgcactcaaccccctggcctgtgcactcaggatgcacaaactcagactgggctttcagagactgcttggactgggtcaggacgtgtccaagtaa

SEQ ID NO: 168 - protein, 319 aa, Homo sapiens
MDTSTSVTYDSSLQISQFILMGLPGIHEWQHWLSLPLTLLYLLALGANLLIIITIQHETVLHEPMYHLLGILAVVDIGLATTIMPKILAIFWFDAKAISLPMCFAQIYAIHCFFCIESGIFLCMAVDRYIAICRPLQYPSIVTKAFVFKATGFIMLRNGLLTIPVPILAAQRHYCSRNEIEHCLCSNLGVISLACDDITVNKFYQLMLAWVLVGSDMALVFSSYAVILHSVLRLNSAEAMSKALSTCSSHLILILFHTGIIVLSVTHLAEKKIPLIPVFLNVLHNVIPPALNPLACALRMHKLRLGFQRLLGLGQDVSK

SEQ ID NO: 169 - DNA, 867 bp, Homo sapiens
  CDS (1)..(867)
atggatattggcctgagtatagccaatagctcagggtttcaactgtctgagttcattctgatagggttcccaggcattcatgagtggcagcactggctctccctgcccttagctcttggtgccaatctcctcatcataatcaccattcaacatgagaccatgctacatgaacccatgtaccatttgctgggcatattagcagtggtggacattggcctggccaccaccatcatgcccaagatcctggccatcttctggtttgatgccaaggccatcagcctccctgagtgttttgctcagatctatgccatccactctttcatgtgcatggagtcaggcatcttcctctgcatggcagtggatagatatatggccatttgttatccccttcagtacacttccatagttactgaagcttttgtcatcaaagccacactgtcagtagtgctcaggaatggcctgttgaccatcccagtgccagtattggctgcccagcgacactactgctccaggaatgagattgatcagtgcctctgctctaacttgggggtcacaagtctggcctgtgatgacaccactattaacaggttttaccagctggccttggtctgggttgtggttgggagtgacatgggtctggtctttgcttcctattctttgattattcactcagtgctgaagctgaactctgctaaagcaacatctaaggccctgaatacctgcagctctcaccttatcctcattctctttttctacacagctattattgtagtatctgtcaccacctggcaggaagaagggctccccgcatccctgttctcctcaatgtgctgcatattgtcatcccctcagcccttaaccccatag

SEQ ID NO: 170 - protein, 288 aa, Homo sapiens
MDIGLSIANSSGFQLSEFILIGFPGIHEWQHWLSLPLALGANLLIIITIQHETMLHEPMYHLLGILAVVDIGLATTIMPKILAIFWFDAKAISLPECFAQIYAIHSFMCMESGIFLCMAVDRYMAICYPLQYTSIVTEAFVIKATLSVVLRNGLLTIPVPVLAAQRHYCSRNEIDQCLCSNLGVTSLACDDTTINRFYQLALVWVVVGSDMGLVFASYSLIIHSVLKLNSAKATSKALNTCSSHLILILFFYTAIIVVSVTTWQEEGLPASLFSSMCCILSSPQPLTP

SEQ ID NO: 171 - DNA, 738 bp, Homo sapiens
  CDS (1)..(738)
atgtcagcctccagtatcacctcaacacatccaacttccttcttgttgatggggattccaggcctggagcacctgcacatctggatctccatccccttctcagcatatacactggccctgcttggaaactgcaccctccttctcatcatccaggctgatgcagccctccatgagcccatatacctctttctggccatgttggcagccatcgacctggtcctttcctcctcagcattgcccaaaatgcttgccatattctggttcagggatcgggagatcaacttttttgcctgtctggtccagatgttcttccttcactccttctccatcatggagtcagcagtgctgctggccatggcctttgaccgctatgtggccatctgcaagccactgcactacaccacggtcctgactgggtccctcatcaccaagattggcatggctgctgtggcccgggctgtgacactaatgactccactccccttcctgctgagatgtttccactactgccgaggcccagtgattgcccgctgctactgtgaacacatggctgtggtcaggctggctgtgggaacactagcttcaacaatatctatggcattgctgtggccatgtttattggagtgttggatctattctttatcatcctatcttatatctttatccttcaggcagttctacaactctcctctcaggaggcccgctacaaagcatttgggacatgtgtctctcacatag

SEQ ID NO: 172 - protein, 245 aa, Homo sapiens [sequence omitted]

SEQ ID NO: 173 - DNA, 615 bp, Homo sapiens
  CDS (1)..(615)
atggttttaaagacaaaatgctgcaacgtagtactaaatccatatctactttcaatttctttctttctgcttttccttcctgaccttcagctactgcaaaagagttgctcatcctctgtactcccacagcctttggtgtgtgtcctagcctcagtgttactagagatatatgtgttccaggtttttctgactgtgtcaagtgttttacataaagttagagtgggagcatttgggagactggcaagtcttggctgcctccccctattattttatggtgcaaggagaaaggaaacttccttgataaccatggcaggtttccatttgactgcctccactttccttattcgggctttgccactcaatgcccagcatgcttcccttgtcgtcagactgtatgtctgtgcattctctcatgggcttattcgctgtggagtgctactgcatctcagaaactccagctacgccctccaaaggcagagctcttcacatctttttgttgctattgttgttgtttgttttcgcatacctctcgagcctagcactagttcttccattctcatcatatttttattcacaggatttttgtcctacctaatcactctacatatgctctga

SEQ ID NO: 174 - protein, 204 aa, Homo sapiens [sequence omitted]

SEQ ID NO: 175 - DNA, 765 bp, Homo sapiens
  CDS (1)..(765)
atgttcttctttctctccatgctggccatgactgacctcatcttgtccacagctggtgtgcctaaagcactcagtatcttttggctaggggctcgcgaaatcacattcccaggatgccttacacaaatgttcttccttcactataactttgtcctggattcagccattctgatggccatggcatttgatcactatgtagctatctgttctcccttgagatataccaccatcttgactcccaagaccatcatcaagagtgctatgggcatctcctttcgaagcttctgcatcatcctgccagatgtattcttgctgacatgcctgcctttctgcaggacacgcatcataccccacacatactgtgagcatataggtgttgcccagctcgcctgtgctgatatctccatcaacttctggtatggcttttgtgttcccatcatgacggtcatctcagatgtgattctcattgctgtttcctacgcacacatcctctgtgctgtctttggccttccctcccaagatgcctgccagaaagccctcggcacttgtggttctcatgtctgtgtcatcctcatgttttatacacctgcctttttctccatcctcgcccatcgctttggacacaatgtctctcgcaccttccacatcatgtttgccaatctctacattgttatcccacctgcactcaaccccatggtttacggagtgaagaccaagcagatcagagataaggttatacttttgttttctaagggtacaggatga

SEQ ID NO: 176 - protein, 254 aa, Homo sapiens
MFFFLSMLAMTDLILSTAGVPKALSIFWLGAREITFPGCLTQMFFLHYNFVLDSAILMAMAFDHYVAICSPLRYTTILTPKTIIKSAMGISFRSFCIILPDVFLLTCLPFCRTRIIPHTYCEHIGVAQLACADISINFWYGFCVPIMTVISDVILIAVSYAHILCAVFGLPSQDACQKALGTCGSHVCVILMFYTPAFFSILAHRFGHNVSRTFHIMFANLYIVIPPALNPMVYGVKTKQIRDKVILLFSKGTG

SEQ ID NO: 177 - DNA, 939 bp, Homo sapiens
  CDS (1)..(939)
atggggttgttcaatgtcactcaccctgcattcttcctcctgactggtatccctggtctggagagctctcactcctggctgtcagggcccctctgcgtgatgtatgctgtggcccttgggggaaatacagtgatcctgcaggctgtgcgagtggagcccagcctccatgagcccatgtactacttcctgtccatgttgtccttcagtgatgtggccatatccatggccacactgcccactgtactccgaaccttctgcctcaatgcccgcaacatcacttttgatgcctgtctaattcagatgtttcttattcacttcttctccatgatggaatcaggtattctgctggccatgagttttgaccgctatgtggccatttgtgaccccttgcgctatgcaactgtgctcaccactgaagtcattgctgcaatgggtttaggtgcagctgctcgaagcttcatcacccttttccctcttccctttcttattaagaggctgcctatctgcagatccaatgttctttctcactcctactgcctgcacccagacatgatgaggcttgcctgtgctgatatcagtatcaacagcatctatggactctttgttcttgtatccacctttggcatggacctgttttttatcttcctctcctatgtgctcattctgcgttctgtcatggccactgcttcccgtgaggaacgcctcaaagctctcaacacatgtgtgtcacatatcctggctgtacttgcattttatgtgccaatgattggggtctccacagtgcaccgctttgggaagcatgtcccatgctacatacatgtcctcatgtcaaatgtgtacctatttgtgcctcctgtgctcaaccctctcatttatagcgccaagacaaaggaaatccgccgagccattttccgcatgtttcaccacatcaaaatatga

SEQ ID NO: 178 - protein, 312 aa, Homo sapiens
MGLFNVTHPAFFLLTGIPGLESSHSWLSGPLCVMYAVALGGNTVILQAVRVEPSLHEPMYYFLSMLSFSDVAISMATLPTVLRTFCLNARNITFDACLIQMFLIHFFSMMESGILLAMSFDRYVAICDPLRYATVLTTEVIAAMGLGAAARSFITLFPLPFLIKRLPICRSNVLSHSYCLHPDMMRLACADISINSIYGLFVLVSTFGMDLFFIFLSYVLILRSVMATASREERLKALNTCVSHILAVLAFYVPMIGVSTVHRFGKHVPCYIHVLMSNVYLFVPPVLNPLIYSAKTKEIRRAIFRMFHHIKI

SEQ ID NO: 179 - DNA, 981 bp, Homo sapiens
  CDS (1)..(981)
atgtcagtccaatattcgctcagtcctcaattcatgctgctatccaacattactcagtttagccccatattctatctcaccagctttcctggattggaaggcatcaaacactggattttcatcccctttttctttatgtacatggttgccatctcaggcaattgtttcattctgatcattattaagaccaaccctcgtctgcacacacccatgtactatctactatccttgctggccctcactgacctggggctgtgtgtgtccacgttgcccaccactatggggatcttctggtttaactcccagagtatctactttggagcgtgtcaaatccagatgttctgcatccactctttttccttcatggagtcctcagtgctcctcatgatgtcctttgaccgctttgtggccatctgccaccctctgaggtattcggtcattatcactggccagcaagtggtcagagcaggcctaattgtcatcttccggggacctgtggccactatccctattgtcctcctcctgaaggcttttccctactgtggatctgtggtcctctcccactcattttgcctgcaccaggaagtgatacagctggcctgcacagataccaccttcaataatctgtatggactgatggtggtagttttcactgtgatgctggacctggtgctcatcgcactgtcctatggactcatcctgcacacagtagcaggcctggcctcccaagaggagcagcgccgtgcctttcagacatgcaccgctcatctctgtgctgtgctagtattctttgtgcccatgatggggctgtccctggtgcaccgttttgggaagcatgccccacctgctattcatcttcttatggccaatgtctacctttttgtgcctcccatgcttaacccaatcatatacagcattaagaccaaggagatccaccgtgccattatcaaactcctaggtcttaaaaaggccagtaaatga

SEQ ID NO: 180 - protein, 326 aa, Homo sapiens
MSVQYSLSPQFMLLSNITQFSPIFYLTSFPGLEGIKHWIFIPFFFMYMVAISGNCFILIIIKTNPRLHTPMYYLLSLLALTDLGLCVSTLPTTMGIFWFNSQSIYFGACQIQMFCIHSFSFMESSVLLMMSFDRFVAICHPLRYSVIITGQQVVRAGLIVIFRGPVATIPIVLLLKAFPYCGSVVLSHSFCLHQEVIQLACTDTTFNNLYGLMVVVFTVMLDLVLIALSYGLILHTVAGLASQEEQRRAFQTCTAHLCAVLVFFVPMMGLSLVHRFGKHAPPAIHLLMANVYLFVPPMLNPIIYSIKTKEIHRAIIKLLGLKKASK

SEQ ID NO: 181 - DNA, 954 bp, Homo sapiens
  CDS (1)..(954)
atgtcccaggtgactaacaccacacaagaaggcatctacttcatcctcacggacatccctggatttgaggcctcccacatctggatctccatccccgtctgctgtctctacaccatctccatcatgggcaataccaccatcctcactgtcattcgcacagagccatctgtccaccagcgcatgtatctgtttctctccatgctggccctgacggacctgggtctcaccctcaccaccctacccacagtcatgcagcttctctggttcaacgttcgtagaatcagctctgaggcctgttttgctcagtttttcttccttcatggattctcctttatggagtcttctgtcctcctggctatgtccgttgactgctatgtggccatctgctgtcccctccattatgcctccatcctcaccaatgaagtcattggtagaactgggttagccatcatttgctgctgtgttctggcggttcttccctcccttttcttactcaagcgactgcctttctgccactcccaccttctctctcgctcctattgcctccaccaggatatgatccgcctggtctgtgctgacatcaggctcaacagctggtatggatttgctcttgccttgctcattattatcgtggatcctctgctcattgtgatctcctatacacttattctgaaaaatatcttgggcacagccacctgggctgagcgactccgtgccctcaataactgcctgtcccacattctagctgtcctggtcctctacattcccatggttggtgtatctatgactcatcgctttgccaagcatgcctctccactggtccatgttatcatggccaatatctacctgctggcacccccggtgatgaaccccatcatttacagtgtaaagaacaagcagatccaatggggaatgttaaatttcctttccctcaaaaatatgcattcaagatga

SEQ ID NO: 182 - protein, 317 aa, Homo sapiens
MSQVTNTTQEGIYFILTDIPGFEASHIWISIPVCCLYTISIMGNTTILTVIRTEPSVHQRMYLFLSMLALTDLGLTLTTLPTVMQLLWFNVRRISSEACFAQFFFLHGFSFMESSVLLAMSVDCYVAICCPLHYASILTNEVIGRTGLAIICCCVLAVLPSLFLLKRLPFCHSHLLSRSYCLHQDMIRLVCADIRLNSWYGFALALLIIIVDPLLIVISYTLILKNILGTATWAERLRALNNCLSHILAVLVLYIPMVGVSMTHRFAKHASPLVHVIMANIYLLAPPVMNPIIYSVKNKQIQWGMLNFLSLKNMHSR

SEQ ID NO: 183 - DNA, 945 bp, Homo sapiens
  CDS (1)..(945)
atgctgggtctcaatggcacccccttccagccagcaacactccagctgacaggcattcctgggatacaaacaggcctcacctgggttgccctgattttctgcatcctctacatgatctccattgtaggtaacctcagcattctcactctggtgttttgggagcctgctctgcatcagcccatgtactacttcctctctatgctcgctctcaatgatctgggagtgtccttttctacacttcccactgtgatttctactttctgcttcaactacaaccatgttgcgtttaatgcttgcctggtccagatgttcttcatccacactttctccttcatggagtcaggcatactgctggccatgagcttggatcgctttgtggctatttgttatccattacgctatgtcactgtgctcactcacaaccgtatattggctatgggtctgggcatccttaccaagagtttcaccactctcttccctttcccttttgtggtgaaacgactgcccttctgcaaaggcaatgttttgcatcactcctactgtctccatccagatctcatgaaagtagcatgtggagacatccatgttaacaacatttatgggctcttggtgatcatttttacctatggtatggactcaactttcatcctgctttcctacgcattgatcctgagagccatgctggtcatcatatcccaggaacagcggctcaaggcactcaacacctgcatgtcacacatctgtgcagtgctggccttttatgtgcccataattgctgtctccatgattcaccgcttctggaaaagtgctccacctgttgttcatgtcatgatgtccaatgtctacctgtttgtaccacccatgctcaaccctatcatctacagtgtgaaaaccaaggagatccgcaaagggattctcaagttcttccataaatcccaggcctga

SEQ ID NO: 184 - protein, 314 aa, Homo sapiens
MLGLNGTPFQPATLQLTGIPGIQTGLTWVALIFCILYMISIVGNLSILTLVFWEPALHQPMYYFLSMLALNDLGVSFSTLPTVISTFCFNYNHVAFNACLVQMFFIHTFSFMESGILLAMSLDRFVAICYPLRYVTVLTHNRILAMGLGILTKSFTTLFPFPFVVKRLPFCKGNVLHHSYCLHPDLMKVACGDIHVNNIYGLLVIIFTYGMDSTFILLSYALILRAMLVIISQEQRLKALNTCMSHICAVLAFYVPIIAVSMIHRFWKSAPPVVHVMMSNVYLFVPPMLNPIIYSVKTKEIRKGILKFFHKSQA

SEQ ID NO: 185 - DNA, 975 bp, Homo sapiens
  CDS (1)..(975)
atgcctctatttaattcattatgctggtttccaacaattcatgtgactcctccatcttttattcttaatggaatacctggtctggaaagagtacatgtatggatctccctcccactctgcacaatgtacatcatcttccttgtggggaatcttggtcttgtgtacctcatttattatgaggagtccttacatcatccgatgtattttttttttggccatgctctctccctcattgacctccttacctgcaccaccactctacccaatgcactctgcatcttctggttcagtctcaaagaaattaacttcaatgcttgcttggcccagatgttctttgttcatgggttcacaggtgtggagtctggggtgctcatgctcatggctctagaccgctatatagccatttgctaccctttgcgttatgctaccacactcaccaaccctatcattgccaaggctgagcttgccaccttcctgaggggtgtattgctgatgattcctttcccattcttggttaagcgtttgcctttctgccaaagcaatattatctcccatacgtactgcgaccacatgtctgtagtaaagctatcttgtgccagcatcaaggtcaatgtaatctatggtctaatggttgctctcctgattggagtgtttgacatttgttgtatatctttgtcttacactttgatcctcaaggcagcgatcagcctctcttcatcagatgctcggcagaaggctttcagcacctgcactgcccatatatctgccatcatcatcacctatgttccagcattcttcactttctttgcccaccgttttgggggacacacaattcccccttctcttcacatcattgtggctaatctttatcttcttcttcccccaactctaaaccctattgtttatggagtaaagacaaaacagatacgcaagagtgtcataaagttcttccagggtgataagggtgcaggttga

SEQ ID NO: 186 - protein, 324 aa, Homo sapiens
MPLFNSLCWFPTIHVTPPSFILNGIPGLERVHVWISLPLCTMYIIFLVGNLGLVYLIYYEESLHHPMYFFFGHALSLIDLLTCTTTLPNALCIFWFSLKEINFNACLAQMFFVHGFTGVESGVLMLMALDRYIAICYPLRYATTLTNPIIAKAELATFLRGVLLMIPFPFLVKRLPFCQSNIISHTYCDHMSVVKLSCASIKVNVIYGLMVALLIGVFDICCISLSYTLILKAAISLSSSDARQKAFSTCTAHISAIIITYVPAFFTFFAHRFGGHTIPPSLHIIVANLYLLLPPTLNPIVYGVKTKQIRKSVIKFFQGDKGAG

SEQ ID NO: 187 - DNA, 975 bp, Homo sapiens
  CDS (1)..(975)
atgaatcatatgtctgcatctctcaaaatctccaatagctccaaattccaggtctctgagttcatcctgctgggattcccgggcattcacagctggcaacactggctatctctgcccctggcactactgtatctctcagcacttgctgcaaacaccctcatcctcatcatcatctggcagaacccttctttacagcagcccatgtatattttccttggcatcctctgtatggtagacatgggtctggccactactatcatccctaagatcctggccatcttctggtttgatgccaaggttattagcctccctgagtgctttgctcagatttatgccattcacttctttgtgggcatggagtctggtatcctactctgcatggcttttgatagatatgtggctatttgtcaccctcttcgctatccatcaattgtcaccagttccttaatcttaaaagctaccctgttcatggtgctgagaaatggcttatttgtcactccagtgcctgtgcttgcagcacagcgtgattattgctccaagaatgaaattgaacactgcctgtgctctaaccttggggtcacaagcctggcttgtgatgacaggaggccaaacagcatttgccagttggttctggcatggcttggaatggggagtgatctaagtcttattatactgtcatatattttgattctgtactctgtacttagactgaactcagctgaagctgcagccaaggccctgagcacttgtagttcacatctcaccctcatccttttcttttacactattgttgtagtgatttcagtgactcatctgacagagatgaaggctactttgattccagttctacttaatgtgttgcacaacatcatccccccttccctcaaccctacagtttatgcacttcagaccaaagaacttagggcagccttccaaaaggtgctgtttgcccttacaaaagaaataagatcttag

SEQ ID NO: 188 - protein, 324 aa, Homo sapiens
MNHMSASLKISNSSKFQVSEFILLGFPGIHSWQHWLSLPLALLYLSALAANTLILIIIWQNPSLQQPMYIFLGILCMVDMGLATTIIPKILAIFWFDAKVISLPECFAQIYAIHFFVGMESGILLCMAFDRYVAICHPLRYPSIVTSSLILKATLFMVLRNGLFVTPVPVLAAQRDYCSKNEIEHCLCSNLGVTSLACDDRRPNSICQLVLAWLGMGSDLSLIILSYILILYSVLRLNSAEAAAKALSTCSSHLTLILFFYTIVVVISVTHLTEMKATLIPVLLNVLHNIIPPSLNPTVYALQTKELRAAFQKVLFALTKEIRS

SEQ ID NO: 189 - DNA, 966 bp, Homo sapiens
  CDS (1)..(966)
atgctaacactgaataaaacagacctaataccagcttcatttattctgaatggagtcccaggactggaagacacacaactctggatttccttcccattctgctctatgtatgttgtggctatggtagggaattgtggactcctctacctcattcactatgaggatgccctgcacaaacccatgtactacttcttggccatgctttcctttactgaccttgttatgtgctctagtacaatccctaaagccctctgcatcttctggtttcatctcaaggacattggatttgatgaatgccttgtccagatgttcttcatccacaccttcacagggatggagtctggggtgcttatgcttatggccctggatcgctatgtggccatctgctaccccttacgctattcaactatcctcaccaatcctgtaattgcaaaggttgggactgccaccttcctgagaggggtattactcattattccctttactttcctcaccaagcgcctgccctactgcagaggcaatatacttccccatacctactgtgaccacatgtctgtagccaaattgtcctgtggtaatgtcaaggtcaatgccatctatggtctgatggttgccctcctgattgggggctttgacatactgtgtatcaccatctcctataccatgattctccgggcagtggtcagcctctcctcagcagatgctcggcagaaggcctttaatacctgcactgcccacatttgtgccattgttttctcctatactccagctttcttctccttcttttcccaccgctttggggaacacataatccccccttcttgccacatcattgtagccaatatttatctgctcctaccacccactatgaaccctattgtctatggggtgaaaaccaaacagatacgagactgtgtcataaggatcctttcaggttctaaggataccaaatcctacagcatgtga

SEQ ID NO: 190 - protein, 321 aa, Homo sapiens
MLTLNKTDLIPASFILNGVPGLEDTQLWISFPFCSMYVVAMVGNCGLLYLIHYEDALHKPMYYFLAMLSFTDLVMCSSTIPKALCIFWFHLKDIGFDECLVQMFFIHTFTGMESGVLMLMALDRYVAICYPLRYSTILTNPVIAKVGTATFLRGVLLIIPFTFLTKRLPYCRGNILPHTYCDHMSVAKLSCGNVKVNAIYGLMVALLIGGFDILCITISYTMILRAVVSLSSADARQKAFNTCTAHICAIVFSYTPAFFSFFSHRFGEHIIPPSCHIIVANIYLLLPPTMNPIVYGVKTKQIRDCVIRILSGSKDTKSYSM

SEQ ID NO: 191 - DNA, 633 bp, Homo sapiens
  CDS (1)..(633)
atgactgcttgcaatgcctcacagggccacccttctttcttcattctccaaggaattcctggcatggaggacaaacacagatggatatctatccccttctcctccatgtatttcattatggtgcttgggaactgcaccatcctcctcaccatctccacagagcgctccctgcacaaacccatgttcctgctcctctgtctgttggccctcacagacctgggcatgtctacaaccaccattcccaaggtgctgtgcattttctggtttggccagagtgagatcagctatgaaggatgcctggttcagctgttcttcatccactccatctctgccatgcagtcagctgtcctgatgaccatggcctttgaccactatgtggccatctgcaagcccttgcgctatgccaccatcctttccaatagttgcactggactcattggcttagtgagtttggtgagagctatcctctttattctccccatgcccatcctccttcagcaaatgccctatcatgccaatcgtgtcatccccaccacctcctgtgagcacatggctgtggtgaagatggtttgtgtagatactacagtcaacaggatatatggcctggtggtggccttgttggttgctggctag

SEQ ID NO: 192 - protein, 210 aa, Homo sapiens
MTACNASQGHPSFFILQGIPGMEDKHRWISIPFSSMYFIMVLGNCTILLTISTERSLHKPMFLLLCLLALTDLGMSTTTIPKVLCIFWFGQSEISYEGCLVQLFFIHSISAMQSAVLMTMAFDHYVAICKPLRYATILSNSCTGLIGLVSLVRAILFILPMPILLQQMPYHANRVIPTTSCEHMAVVKMVCVDTTVNRIYGLVVALLVAG

SEQ ID NO: 193 - DNA, 1107 bp, Homo sapiens
  CDS (1)..(1107)
atgcctcactgccttttatgcaacaacaaaactcactgggcccctgttaggagcactatgtgctttgaaaaggaagtggaatatctcaactggaatgactccttggccatcctactcctgattctctccctactgggaatcatatttgttctggttgttggcataatatttacaagaaacctgaacacacctgttgtgaaatcatccgggggattaagagtctgctatgtgatccttctctgtcatttcctcaattttgccagcacgagctttttcattggagaaccacaagacttcacatgtaaaaccaggcagacaatgtttggagtgagctttactctttgcatctcctgcattttgacgaagtctctgaaaattttgctagccttcagctttgatcccaaattacagaaatttctgaagtgcctctatagaccgatccttattatcttcacttgcacgggcatccaggttgtcatttgcacactctggctaatctttgcagcacctactgtagaggtgaatgtctccttgcccagagtcatcatcctggagtgtgaggagggatccatacttgcatttggcaccatgctgggctacattgccatcctggccttcatttgcttcatatttgctttcaaaggcaaatatgagaattacaatgaagccaaattcattacatttggcatgctcatttacttcatagcttggatcacattcatccctatctatgctaccacatttggcaaatatgtaccagctgtggagattattgtcatattaatatctaactatggaatcctgtattgcacattcatccccaaatgctatgttattatttgtaagcaagagattaacacaaagtctgcctttctcaagatgatctacagttattcttcccatagtgtgagcagcattgccctgagtcctgcttcactggactccatgagcggcaatgtcacaatgaccaatcccagctctagtggcaagtctgcaacctggcagaaaagcaaagatcttcaggcacaagcatttgcacacatatgcagggaaaatgccacaagtgtatctaaaactttgcctcgaaaaagaatgtcaagtatatga

SEQ ID NO: 194 - protein, 368 aa, Homo sapiens
MPHCLLCNNKTHWAPVRSTMCFEKEVEYLNWNDSLAILLLILSLLGIIFVLVVGIIFTRNLNTPVVKSSGGLRVCYVILLCHFLNFASTSFFIGEPQDFTCKTRQTMFGVSFTLCISCILTKSLKILLAFSFDPKLQKFLKCLYRPILIIFTCTGIQVVICTLWLIFAAPTVEVNVSLPRVIILECEEGSILAFGTMLGYIAILAFICFIFAFKGKYENYNEAKFITFGMLIYFIAWITFIPIYATTFGKYVPAVEIIVILISNYGILYCTFIPKCYVIICKQEINTKSAFLKMIYSYSSHSVSSIALSPASLDSMSGNVTMTNPSSSGKSATWQKSKDLQAQAFAHICRENATSVSKTLPRKRMSSI

SEQ ID NO: 195 - DNA, 879 bp, Homo sapiens
  CDS (1)..(879)
atggtgggaaacctcctcatttgggtgactactattggcagcccctccttgggctccctaatgtacttcttccttgcctacttgtcacttatggatgccatatattccactgccatgtcacccaaattgatgatagacttactctgtgataaaatcgctatttccttgtcagcttgcatgggtcagctcttcatagaacacttacttggtggtgcagaggtcttccttttggtggtgatggcctatgatcgctatgtggctatctctaagccgctgcactatttgaacatcatgaatcgactggtttgcatccttctgttggtggtggccatgattggaggttttgtgcactctgtggttcaaattgtctttctgtacagtctaccaatctgtggccccaatgttattgaccactctgtctgtgacatgtacccattgttggaactgttgtgccttgacacctactttataggactcactgtggttgccaatggtggaataatttgtatggtcatctttacctttctgctaatctcctgtggagtcatcctaaacttccttaaaacttacagtcaggaagagaggcataaagccctgcctacctgcatctcccacatcattgtggttgccctcgtttttgttccctgtatttttatgtatgttagacccgtttccaactttccctttgataaattaatgactgtgttttattcaattatcacactcatgttgaatcctttaatatactcgttgagacaatcagagatgaaaaatgctatgaaaaatctctggtgtgaaaagttaagtatagttagaaaaagagtatctcccacactgaacatatttattcctagttctaaggcaacaaataggcggtaa

SEQ ID NO: 196 - protein, 292 aa, Homo sapiens
MVGNLLIWVTTIGSPSLGSLMYFFLAYLSLMDAIYSTAMSPKLMIDLLCDKIAISLSACMGQLFIEHLLGGAEVFLLVVMAYDRYVAISKPLHYLNIMNRLVCILLLVVAMIGGFVHSVVQIVFLYSLPICGPNVIDHSVCDMYPLLELLCLDTYFIGLTVVANGGIICMVIFTFLLISCGVILNFLKTYSQEERHKALPTCISHIIVVALVFVPCIFMYVRPVSNFPFDKLMTVFYSIITLMLNPLIYSLRQSEMKNAMKNLWCEKLSIVRKRVSPTLNIFIPSSKATNRR

SEQ ID NO: 197 - DNA, 957 bp, Homo sapiens
  CDS (1)..(957)
atgtcagattccaacctcagtgataaccatcttccagacaccttcttcttaacagggatcccagggctggaggctgcccacttctggattgccatccctttctgtgccatgtatcttgtagcactggttggaaatgctgccctcatcctggtcattgccatggacaatgctcttcatgcacctatgtacctcttcctctgccttctctcactcacagacctggctctcagttctaccactgtgcccaagatgctggccattttgtggctccatgctggtgagatttcctttggtggatgcctggcccagatgttttgtgtccattctatctatgctctggagtcctcgattctacttgccatggcctttgataggtatgtggctatctgtaacccattaaggtatacaaccattctcaaccatgctgtcataggcagaattggctttgttgggctattccgtagtgtggctattgtctcccccttcatcttcttgctgaggcgactcccctactgtggtcaccgtgtcatgacacacacatactgtgagcatatgggcatcgcccgactggcctgtgccaacatcactgtcaatattgtctatgggctaactgtggctctgctggccatgggactggattccattctcattgccatttcctatggctttatcctccatgcagtctttcaccttccatctcatgatgcccagcacaaagctctgagtacctgtggctcccacattggcatcatcctggttttctacatccctgccttcttctccttcctcacccaccgctttggtcaccacgaagtccccaagcatgtgcacatctttctggctaatctctatgtgctggtgcctcctgtactcaatcctattctctatggagctagaaccaaggagattcggagtcgacttctaaaactgcttcacctggggaagacttcaatatga

SEQ ID NO: 198 - protein, 318 aa, Homo sapiens
MSDSNLSDNHLPDTFFLTGIPGLEAAHFWIAIPFCAMYLVALVGNAALILVIAMDNALHAPMYLFLCLLSLTDLALSSTTVPKMLAILWLHAGEISFGGCLAQMFCVHSIYALESSILLAMAFDRYVAICNPLRYTTILNHAVIGRIGFVGLFRSVAIVSPFIFLLRRLPYCGHRVMTHTYCEHMGIARLACANITVNIVYGLTVALLAMGLDSILIAISYGFILHAVFHLPSHDAQHKALSTCGSHIGIILVFYIPAFFSFLTHRFGHHEVPKHVHIFLANLYVLVPPVLNPILYGARTKEIRSRLLKLLHLGKTSI

SEQ ID NO: 199 - DNA, 729 bp, Homo sapiens
  CDS (1)..(729)
atggctccgaccaacctcacatctgcccccgtgttcctcctcctcggcctggtggacggaacagacgcccacccgctgctgttcctgctctgccttggcatctatctgctcaacgccctgagcaacctgagcatggtggcgctggtgagatccgacggggccctccgctcccccatgtattacttcttgggtcacctgagcctcgtggacgtctgctttaccaccgtcacggtccccaggctgctggccggcctgctccacccgggccaggccatatccttccaggcgtgctttgccgagatgtacttcttcgtggctctgggcatcaccgagagctacctcctggcggccatgtcctacgaccgcgcgacggcggcgtgccggcccctgcgctacggcgcgctggtgacgccatgggcgtgcgcctcgctggtgcgtgcgtcgtgggccgtgacgcacctgcactcgctgctgcacacgctgctcctctccgcgctctcctacccctaccccacccccgtgcgccccttcttttgcgacatgacggtgatgctgagcttggcgacctcggacacgtccgccgcggagacggccatcttctccgagggcctggccgtggtgttggccccgctgctcctcgtgttccttttcctacgcgcgcatcctggtcgcggtgctcggcttgccgcggccggcgccgcgccttctcctactgcggggcccacctag

SEQ ID NO: 200 - protein, 242 aa, Homo sapiens
MAPTNLTSAPVFLLLGLVDGTDAHPLLFLLCLGIYLLNALSNLSMVALVRSDGALRSPMYYFLGHLSLVDVCFTTVTVPRLLAGLLHPGQAISFQACFAEMYFFVALGITESYLLAAMSYDRATAACRPLRYGALVTPWACASLVRASWAVTHLHSLLHTLLLSALSYPYPTPVRPFFCDMTVMLSLATSDTSAAETAIFSEGLAVVLAPLLLVFLFLRAHPGRGARLAAAGAAPSPTAGPT

SEQ ID NO: 201 - DNA, 942 bp, Homo sapiens
  CDS (1)..(942)
atggaaactgcaaattacaccaaggtgacagaatttgttctcactggcctatcccagactcgggaggtccaactagtcctatttgttatatttctatccttctatttgttcatcctaccaggaaatatccttatcatttgcaccatcaggctagaccctcatctgacttctcctatgtatttcctgttggctaatctggccctccttgatatttggtactcttccattacagcccctaaaatgctcatagacttctttgtggagaggaagataatttcctttggtggatgcattgcacagctcttcttcttacactttgttggggcttcggagatgttcttgctcatagtgatggcctatgaccgctatgctgctatctgccgacccctccactatgctaccatcatgaatcgacgtctctgctgtatcctggtggctctctcctggatggggggcttcattcattctataatacaggtggctctcattgttcgacttcctttctgtgggcccaatgagttagacagttacttctgtgacatcacacaggttgtccggattgcctgtgccaacaccttcccagaggagttagtgatgatctgtagtagtggtctgatctctgtggtgtgtttcattgctctgttaatgtcctatgccttccttctggccttgctcaagaaacattcaggctcagatgagaataccaacagggccatgtccacctgctattcccacattaccattgtggtgctaatgtttgggccatccatctacatttatgctcgcccatttgactcattttccctagataaagtggtgtctgtgtttcatactgtaatattccctttacttaatcccattatttacacattgagaaacaaggaagtaaaggcagccatgaggaaggtggtcaccaaatatattttgtgtgaagagaagtga

SEQ ID NO: 202 - protein, 313 aa, Homo sapiens [sequence omitted]

SEQ ID NO: 203 - DNA, 966 bp, Homo sapiens
  CDS (1)..(966)
atgtctggggacaacagctccagcctgaccccaggattctttatcttgaatggcgttcctgggctggaagccacacacatctggatctccctgccattctgctttatgtacatcattgctgtcgtggggaactgtgggctcatctgcctcatcagccatgaggaggccctgcaccggcccatgtactacttcctggccctgctctccttcactgatgtcaccttgtgcaccaccatggtacctaatatgctgtgcatattctggttcaacctcaaggagattgactttaacgcctgcctggcccagatgttttttgtccatatgctgacagggatggagtctggggtgctcatgctcatggccctggaccgctatgtggccatctgctaccccttacgctatgccaccatccttaccaaccctgtcatcgccaaggctggtcttgccaccttcttgaggaatgtgatgctcatcatcccattcactctcctcaccaagcgcctgccctattgccgggggaacttcatcccccacacctactgtgaccatatgtctgtggccaaggtatcctgtggcaatttcaaggtcaatgctatttatggtctgatggttgctctcctgattggtgtgtttgatatctgctgtatctctgtatcttacactatgattttgcaggctgttatgagcctgtcatcagcagatgctcgtcacaaagccttcagcacctgcacatctcacatgtgttccattgtgatcacctatgttgctgcttttttcacttttttcactcatcgttttgtaggacacaatatcccaaaccacatacacatcatcgtggccaacctttatctgctactgcctcctaccatgaacccaattgtttatggagtcaagaccaagcagattcaggaaggtgtaattaaatttttacttggagacaaggttagttttacctatgacaaatga

SEQ ID NO: 204 - protein, 321 aa, Homo sapiens
MSGDNSSSLTPGFFILNGVPGLEATHIWISLPFCFMYIIAVVGNCGLICLISHEEALHRPMYYFLALLSFTDVTLCTTMVPNMLCIFWFNLKEIDFNACLAQMFFVHMLTGMESGVLMLMALDRYVAICYPLRYATILTNPVIAKAGLATFLRNVMLIIPFTLLTKRLPYCRGNFIPHTYCDHMSVAKVSCGNFKVNAIYGLMVALLIGVFDICCISVSYTMILQAVMSLSSADARHKAFSTCTSHMCSIVITYVAAFFTFFTHRFVGHNIPNHIHIIVANLYLLLPPTMNPIVYGVKTKQIQEGVIKFLLGDKVSFTYDK

SEQ ID NO: 205 - DNA, 963 bp, Homo sapiens
  CDS (1)..(963)
atgtcatttctaaatggcaccagcctaactccagcttcattcatcctaaatggcatccctggtttggaagatgtgcatttgtggatctccttcccactgtgtaccatgtacagcattgctattacagggaacttcggccttatgtacctcatctactgtgatgaggccttacacagacctatgtatgtcttccttgcccttctttccttcacagatgtgctcatgtgcaccagcacccttcccaacactctcttcatattgtggtttaatctcaaggagattgattttaaagcctgcctcgcccagatgttctttgtgcacaccttcacagggatggagtctggggtgctcatgctcatggccctggaccactgtgtggccatctgcttccctctgcgttatgccaccatcctcactaattcagtcattgctaaagctgggttcctcacttttcttaggggtgtgatgcttgttatcccttccactttcctcaccaagcgccttccatactgcaagggcaacgtcataccccacacctactgtgaccacatgtctgtggccaagatatcttgtggtaatgtcagggttaacgccatctatggtttgatagttgccctgctgattgggggctttgatatcctgtgcattacaatctcctacactatgattcttcaagcagttgtgagtctatcatcagcagatgctcgacagaaggccttcagcacctgcactgcccacttctgtgccatagtcctcacctatgttccagccttctttaccttctttacacaccattttgggggacacaccattcctctacacatacatattattatggctaatctctacctactaatgcctcccacaatgaaccctattgtgtatggggtgaaaaccaggcaggtacgagaaagtgtcattaggttctttcttaagggaaaggacaattctcataacttttaa

SEQ ID NO: 206 - protein, 320 aa, Homo sapiens
MSFLNGTSLTPASFILNGIPGLEDVHLWISFPLCTMYSIAITGNFGLMYLIYCDEALHRPMYVFLALLSFTDVLMCTSTLPNTLFILWFNLKEIDFKACLAQMFFVHTFTGMESGVLMLMALDHCVAICFPLRYATILTNSVIAKAGFLTFLRGVMLVIPSTFLTKRLPYCKGNVIPHTYCDHMSVAKISCGNVRVNAIYGLIVALLIGGFDILCITISYTMILQAVVSLSSADARQKAFSTCTAHFCAIVLTYVPAFFTFFTHHFGGHTIPLHIHIIMANLYLLMPPTMNPIVYGVKTRQVRESVIRFFLKGKDNSHNF

SEQ ID NO: 207 - DNA, 948 bp, Homo sapiens
  CDS (1)..(948)
atgacaacacaccgaaatgacaccctctccactgaagcttcagacttcctcttgaattgttttgtcagatcccccagctggcagcactggctgtccctgcccctcagcctccttttcctcttggccgtaggggccaacaccaccctcctgatgaccatctggctggaggcctctctgcaccagcccctgtactacctgctcagcctcctctccctgctggacatcgtgctctgcctcactgtcatccccaaggtcctgaccatcttctggtttgacctcaggcccatcagcttccctgcctgcttcctccagatgtacatcatgaattgtttcctagccatggagtcttgcacattcatggtcatggcctatgatcgttatgtagccatctgccacccactgagatatccatcaatcatcactgatcactttgtagtcaaggctgccatgtttattttgaccagaaatgtgcttatgactctgcccatccccatcctttcagcacaactccgttattgtggaagaaatgtcattgagaactgcatctgtgccaatatgtctgtttccagactctcctgcgatgatgtcaccatcaatcacctttaccaatttgctggaggctggactctgctaggatctgacctcatccttatcttcctctcctacaccttcattctgcgagctgtgctgagactcaaggcagagggtgccgtggcaaaggccctaagcacatgtggctcccacttcatgctcatcctcttcttcagcaccatccttctggtttttgtcctcacacatgtggctaagaagaaagtctcccctgatgtgccagtcttgctcaatgttctccaccatgtcattcctgcagcccttaaccccatcatttacggggtgagaacccaagaaattaagcagggaatgcagaggttgttgaagaaagggtgctaa

SEQ ID NO: 208 - protein, 315 aa, Homo sapiens
MTTHRNDTLSTEASDFLLNCFVRSPSWQHWLSLPLSLLFLLAVGANTTLLMTIWLEASLHQPLYYLLSLLSLLDIVLCLTVIPKVLTIFWFDLRPISFPACFLQMYIMNCFLAMESCTFMVMAYDRYVAICHPLRYPSIITDHFVVKAAMFILTRNVLMTLPIPILSAQLRYCGRNVIENCICANMSVSRLSCDDVTINHLYQFAGGWTLLGSDLILIFLSYTFILRAVLRLKAEGAVAKALSTCGSHFMLILFFSTILLVFVLTHVAKKKVSPDVPVLLNVLHHVIPAALNPIIYGVRTQEIKQGMQRLLKKGC

SEQ ID NO: 209 - DNA, 942 bp, Homo sapiens
  CDS (1)..(942)
atgcctatagctaacgacacccagttccatacttcttcattcctactgctgggtatcccagggctagaagatgtgcacatctggattggattcccttttttctctgtgtatcttattgcactcctgggaaatgctgctatcttctttgtgatccaaactgagcagagtctccatgagcccatgtactactgcctggccatgttggattccattgacctgagcttgtctacggccaccattcccaaaatgctgggcatcttctggttcaatatcaaggaaatatcttttggaggctacctttctcagatgttcttcatccatttcttcactgtcatggagagcatcgtattggtggccatggcctttgaccgctacattgccatttgcaaacctctttggtacaccatgatcctcaccagcaaaatcatcagcctcattgcaggcattgctgtcctgaggagcttgtacatggtcattccactggtgtttctcctcttaaggttgcccttctgtggacatcgtatcatccctcatacttactgtgagcacatgggcattgcccgtctggcctgtgccagcatcaaagtcaacattatgtttggtcttggcagtatttctctcttgttattggatgtgctccttattattctctcccatatcaggatcctctatgctgtcttctgcctgccctcctgggaagctcgactcaaagctctcaacacctgtggctctcacattggtgttatcttagccttttctacaccagcatttttctctttctttacacactgctttggccatgatattccccaatatatccacattttcttggctaatctatatgtggttgttcctcccaccctcaatcctgtaatctatggggtcagaaccaaacatattagggagacagtgctgaggattttcttcaagacagatcactaa

SEQ ID NO: 210 - protein, 313 aa, Homo sapiens
MPIANDTQFHTSSFLLLGIPGLEDVHIWIGFPFFSVYLIALLGNAAIFFVIQTEQSLHEPMYYCLAMLDSIDLSLSTATIPKMLGIFWFNIKEISFGGYLSQMFFIHFFTVMESIVLVAMAFDRYIAICKPLWYTMILTSKIISLIAGIAVLRSLYMVIPLVFLLLRLPFCGHRIIPHTYCEHMGIARLACASIKVNIMFGLGSISLLLLDVLLIILSHIRILYAVFCLPSWEARLKALNTCGSHIGVILAFSTPAFFSFFTHCFGHDIPQYIHIFLANLYVVVPPTLNPVIYGVRTKHIRETVLRIFFKTDH

SEQ ID NO: 211 - DNA, 954 bp, Homo sapiens
  CDS (1)..(954)
atggcaggaagaatgtctacgtctaatcacacccagttccatccttcttcattcctactgctgggtatcccagggctagaagatgtgcacatttggattggagtcccttttttctttgtgtatcttgttgcactcctgggaaacactgctctcttgtttgtgatccagactgagcagagtctccatgagcctatgtactacttcctggccatgttggattccattgacctgggcttgtctacagccaccatccccaaaatgttgggcatcttctggttcaataccaaagaaatatcttttggaggctgcctttctcacatgttcttcatccatttcttcactgctatggagagcattgtgttggtggccatggcctttgaccgctacattgccatttgcaaacctcttcggtacaccatgatcctcaccagcaaaatcatcagcctcattgcaggcattgctgtcctgaggagcctgtacatggttgttccactggtgtttctccttctgaggctgcccttctgtgggcatcgtatcatccctcatacttattgtgagcacatgggcattgcccgtctggcctgtgccagcatcaaagtcaacattaggtttggccttggcaacatatctctcttgttactggatgttatccttattattctctcctatgtcaggatcctgtatgctgtcttctgcctgccctcctgggaagctcgactcaaagctctcaacacctgtggttctcatattggtgttatcttagccttttttacaccagcatttttttcattcttgacacatcgttttggccataatatcccacagtatatacatattatattagccaacctgtatgtggttgtcccaccagccctcaatcctgtaatctatggagtcaggacaaagcagattcgagagagagtgctgaggatttttctcaagaccaatcactaa

SEQ ID NO: 212 - protein, 317 aa, Homo sapiens
MAGRMSTSNHTQFHPSSFLLLGIPGLEDVHIWIGVPFFFVYLVALLGNTALLFVIQTEQSLHEPMYYFLAMLDSIDLGLSTATIPKMLGIFWFNTKEISFGGCLSHMFFIHFFTAMESIVLVAMAFDRYIAICKPLRYTMILTSKIISLIAGIAVLRSLYMVVPLVFLLLRLPFCGHRIIPHTYCEHMGIARLACASIKVNIRFGLGNISLLLLDVILIILSYVRILYAVFCLPSWEARLKALNTCGSHIGVILAFFTPAFFSFLTHRFGHNIPQYIHIILANLYVVVPPALNPVIYGVRTKQIRERVLRIFLKTNH

SEQ ID NO: 213 - DNA, 936 bp, Homo sapiens
  CDS (1)..(936)
atgttttatcacaacaagagcatatttcacccagtcacatttttcctcattggaatcccaggtctggaagacttccacatgtggatctccgggcctttctgctctgtttaccttgtggctttgctgggcaatgccaccattctgctagtcatcaaggtagaacagactctccgggagcccatgttctacttcctggccattctttccactattgatttggccctttctgcaacctctgtgcctcgcatgctgggtatcttctggtttgatgctcacgagattaactatggagcttgtgtggcccagatgtttctgatccatgccttcactggcatggaggctgaggtcttactggctatggcttttgaccgttatgtggccatctgtgctccactacattacgcaaccatcttgacatccctagtgttggtgggcattagcatgtgcattgtaattcgtcccgttttacttacacttcccatggtctatcttatctaccgcctacccttttgtcaggctcacataatagcccattcctactgtgagcacatgggcattgcaaaattgtcctgtggaaacattcgtatcaatggtatctatgggctttttgtagtttctttctttgttctgaacctggtgctcattggcatctcgtatgtttacattctccgtgctgtcttccgcctcccatcacatgatgctcagctaaaagccctaagcacgtgtggcgctcatgttggagtcatctgtgttttctatatcccttcagtcttctctttccttactcatcgatttggacaccaaataccaggttacattcacattcttgttgccaatctctatttgattatcccaccctctctcaaccccatcatttatggggtgaggaccaaacagattcgagagcgagtgctctatgtttttactaaaaaataa

SEQ ID NO: 214 - protein, 311 aa, Homo sapiens
MFYHNKSIFHPVTFFLIGIPGLEDFHMWISGPFCSVYLVALLGNATILLVIKVEQTLREPMFYFLAILSTIDLALSATSVPRMLGIFWFDAHEINYGACVAQMFLIHAFTGMEAEVLLAMAFDRYVAICAPLHYATILTSLVLVGISMCIVIRPVLLTLPMVYLIYRLPFCQAHIIAHSYCEHMGIAKLSCGNIRINGIYGLFVVSFFVLNLVLIGISYVYILRAVFRLPSHDAQLKALSTCGAHVGVICVFYIPSVFSFLTHRFGHQIPGYIHILVANLYLIIPPSLNPIIYGVRTKQIRERVLYVFTKK

SEQ ID NO: 215 - DNA, 927 bp, Homo sapiens
  CDS (1)..(927)
atgaataccactctatttcatccttactctttccttcttctgggaattcctgggctggaaagtatgcatctctgggttggttttcctttctttgctgtgttcctgacagctgtccttgggaatatcaccatcctttttgtgattcagactgacagtagtctccatcatcccatgttctacttcctggccattctgtcatctattgacccgggcctgtctacatccaccatccctaaaatgcttggcaccttctggtttaccctgagagaaatctcctttgaaggatgccttacccagatgttcttcatccacctgtgcactggcatggaatcagctgtgcttgtggccatggcctatgattgctatgtggccatctgtgaccctctttgctacacgttggtgctgacaaacaaggtggtgtcagttatggcactggccatctttctgagacccttagtctttgtcataccctttgttctatttatcctaaggcttccattttgtggacaccaaattattcctcatacttatggtgagcacatgggcattgcccgcctgtcttgtgccagcatcagggttaacatcatctatggcttatgtgccatctctatcctggtctttgacatcatagcaattgtcatttcctatgtacagatcctttgtgctgtatttctactctcttcacatgatgcacgactcaaggcattcagcacctgtggctctcatgtgtgtgtcatgttgactttctatatgcctgcatttttctcattcatgacccataggtttggtcggaatatacctcactttatccacattcttctggctaatttctatgtagtcattccacctgctctcaactctgtaatttatggtgtcagaaccaaacagattagagcacaagtgctgaaaatgtttttcaataaataa

SEQ ID NO: 216 - protein, 308 aa, Homo sapiens
MNTTLFHPYSFLLLGIPGLESMHLWVGFPFFAVFLTAVLGNITILFVIQTDSSLHHPMFYFLAILSSIDPGLSTSTIPKMLGTFWFTLREISFEGCLTQMFFIHLCTGMESAVLVAMAYDCYVAICDPLCYTLVLTNKVVSVMALAIFLRPLVFVIPFVLFILRLPFCGHQIIPHTYGEHMGIARLSCASIRVNIIYGLCAISILVFDIIAIVISYVQILCAVFLLSSHDARLKAFSTCGSHVCVMLTFYMPAFFSFMTHRFGRNIPHFIHILLANFYVVIPPALNSVIYGVRTKQIRAQVLKMFFNK

SEQ ID NO: 217 - DNA, 948 bp, Homo sapiens
  CDS (1)..(948)
atgggagactggaataacagtgatgctgtggagcccatatttatcctgaggggttttcctggactggagtatgttcattcttggctctccatcctcttctgtcttgcatatttggtagcatttatgggtaatgttaccatcctgtctgtcatttggatagaatcctctctccatcagcccatgtattactttatttccatcttagcagtgaatgacctggggatgtccctgtctacacttcccaccatgcttgctgtgttatggttggatgctccagagatccaggcaagtgcttgctatgctcagctgttcttcatccacacattcacattcctggagtcctcagtgttgctggccatggcctttgaccgttttgttgctatctgccatccactgcactaccccaccatcctcaccaacagtgtaattggcaaaattggtttggcctgtttgctacgaagcttgggagttgtacttcccacacctttgctactgagacactatcactactgccatggcaatgccctctctcacgccttctgtttgcaccaggatgttctaagattatcctgtacagatgccaggaccaacagtatttatgggctttgtgtagtcattgccacactaggtgtggattcaatcttcatacttctttcttatgttctgattcttaatactgtgctggatattgcatctcgtgaagagcagctaaaggcactcaacacatgtgtatcccatatctgtgtggtgcttatcttctttgtgccagttattggggtgtcaatggtccatcgctttgggaagcatctgtctcccatagtccacatcctcatggcagacatctaccttcttcttcccccagtccttaaccctattgtctatagtgtcagaacaaagcagattcgtctaggaattctccacaagtttgtcctaaggaggaggttttaa

SEQ ID NO: 218 - protein, 315 aa, Homo sapiens
MGDWNNSDAVEPIFILRGFPGLEYVHSWLSILFCLAYLVAFMGNVTILSVIWIESSLHQPMYYFISILAVNDLGMSLSTLPTMLAVLWLDAPEIQASACYAQLFFIHTFTFLESSVLLAMAFDRFVAICHPLHYPTILTNSVIGKIGLACLLRSLGVVLPTPLLLRHYHYCHGNALSHAFCLHQDVLRLSCTDARTNSIYGLCVVIATLGVDSIFILLSYVLILNTVLDIASREEQLKALNTCVSHICVVLIFFVPVIGVSMVHRFGKHLSPIVHILMADIYLLLPPVLNPIVYSVRTKQIRLGILHKFVLRRRF

SEQ ID NO: 219 - DNA, 978 bp, Homo sapiens
  CDS (1)..(978)
atgttccttcccaatgacacccagtttcacccctcctccttcctgttgctggggatcccaggactagaaacacttcacatctggatcggctttcccttctgtgctgtgtacatgatcgcactcatagggaacttcactattctacttgtgatcaagactgacagcagcctacaccagcccatgttctacttcctggccatgttggccaccactgatgtgggtctctcaacagctaccatccctaagatgcttggaatcttctggatcaacctcagagggatcatctttgaagcctgcctcacccagatgttttttatccacaacttcacacttatggagtcagcagtccttgtggcaatggcttatgacagctatgtggccatctgcaatccactccaatatagcgccatcctcaccaacaaggttgtttctgtgattggtcttggtgtgtttgtgagggctttaattttcgtcattccctctatacttcttatattgcggttgcccttctgtgggaatcatgtaattccccacacctactgtgagcacatgggtcttgctcatctatcttgtgccagcatcaaaatcaatattatttatggtttatgtgccatttgtaatctggtgtttgacatcacagtcattgccctctcttatgtgcatattctttgtgctgttttccgtcttcctactcatgagccccgactcaagtccctcagcacatgtggttcacatgtgtgtgtaatccttgccttctatacaccagccctcttttcctttatgactcattgctttggccgaaatgtgccccgctatatccatatactcctagccaatctctatgttgtggtgccaccaatgctcaatcctgtcatatatggagtcagaaccaagcagatctataaatgtgtaaagaaaatattattgcaggaacaaggaatggaaaaggaagagtacctaatacatacgaggttctga

SEQ ID NO: 220 - protein, 325 aa, Homo sapiens
MFLPNDTQFHPSSFLLLGIPGLETLHIWIGFPFCAVYMIALIGNFTILLVIKTDSSLHQPMFYFLAMLATTDVGLSTATIPKMLGIFWINLRGIIFEACLTQMFFIHNFTLMESAVLVAMAYDSYVAICNPLQYSAILTNKVVSVIGLGVFVRALIFVIPSILLILRLPFCGNHVIPHTYCEHMGLAHLSCASIKINIIYGLCAICNLVFDITVIALSYVHILCAVFRLPTHEPRLKSLSTCGSHVCVILAFYTPALFSFMTHCFGRNVPRYIHILLANLYVVVPPMLNPVIYGVRTKQIYKCVKKILLQEQGMEKEEYLIHTRF

SEQ ID NO: 221 - DNA, 777 bp, Homo sapiens
  CDS (1)..(777)
atggacatctgcggcacctcctcctttgtgcctctcatgctagacaatttcctggaaacccagaggaccatttccttccctggctgtgccctgcagatgtacctgaccctggcgctgggatcaacggagtgcctgctgctggctgtgatggcatatgaccgttatgtggctatctgccagccgcttaggtacccagagctcatgagtgggcagacctgcatgcagatggcagcgctgagctgggggacaggctttgccaactcactgctacagtccatccttgtctggcacctccccttctgtggccacgtcatcaactacttctatgagatcttggcagtgctaaaactggcctgtggggacatctccctcaatgcgctggcattaatggtggccacagccgtcctgacactggcccccctcttgctcatctgcctgtcttaccttttcatcctgtctgccatccttagggtaccctctgctgcaggccggtgcaaagccttctccacctgctcagcccaccgcacagtggtggtggttttttatgggacaatctccttcatgtacttcaaacccaaggccaaggatcccaacgtggataagactgtcgcattgttctacggggttgtgacgccctcgctgaaccccatcatttacagcctgaggaatgcagaggtgaaagctgccgtcctaactctgctgagaggaggtttgctctccaggaaagcatcccactgctactgctgccctctgcccctgtcagctggcataggctag

SEQ ID NO: 222 - protein, 258 aa, Homo sapiens [sequence omitted]

SEQ ID NO: 223 - DNA, 672 bp, Homo sapiens
  CDS (1)..(672)
atggccaatgtcaccttggtgacaggatttcttcttatggggttttctaatatccagaagctgcggattttatatggtgtgctcttcctactgatttacctggcagccctaatgagtaaccttctcatcattactctcattaccctggacgtaaagctccaaacacccatgtacttcttcctgaagaacttatcctttttggatgtcttcctggtgtctgttccaatcccaaaattcattgtcaacaacctaacccacaacaattccatttccattctaggatgtgccttccagctacttttaatgacttccttctcagcaggagagatatttatcctcactgccatgtcctatgaccgctatgtagccatctgctgtcccctgaactacgaggtaatcatgaatactggagtctgtgtgttaatggcaagtgtttcctgggccattggagggctctttggtactgcgtacacagctggcacattttccatgcctttctgtggctccagtgtgattccacagtttttctgtgatgttccttcattactaaggatttcctgttctgaaacactaatggtaatttatgcaggtattggagttggtgcatgtttaagcatttcttgtttcatctgtattgtgatctcttacattatatcttctccactgtactga

SEQ ID NO: 224 - protein, 223 aa, Homo sapiens
MANVTLVTGFLLMGFSNIQKLRILYGVLFLLIYLAALMSNLLIITLITLDVKLQTPMYFFLKNLSFLDVFLVSVPIPKFIVNNLTHNNSISILGCAFQLLLMTSFSAGEIFILTAMSYDRYVAICCPLNYEVIMNTGVCVLMASVSWAIGGLFGTAYTAGTFSMPFCGSSVIPQFFCDVPSLLRISCSETLMVIYAGIGVGACLSISCFICIVISYIISSPLY

SEQ ID NO: 225 - DNA, 933 bp, Homo sapiens
  CDS (1)..(933)
atggacccacagaactattccttggtgtcagaatttgtgttgcatggactctgcacttcacgacatcttcaaaattttttctttatatttttctttggggtctatgtggccattatgctgggtaaccttctcattttggtcactgtaatttctgatccctgcctgcactcctcccctatgtacttcctgctggggaacctagctttcctggacatgtggctggcctcatttgccactcccaagatgatcagggatttccttagtgatcaaaaactcatctcctttggaggatgtatggctcaaatcttcttcttgcactttactggtggggctgagatggtgctcctggtttccatggcctatgacagatatgtggccatatgcaaacccttgcattacatgactttgatgagttggcagacttgcatcaggctggtgctggcttcatgggtcgttggatttgtgcactccatcagtcaagtggctttcactgtaaatttgccttactgtggccccaatgaggtagacagcttcttctgtgacctccctctggtgatcaaacttgcctgcatggacacctatgtcttgggtataattatgatctcagacagtgggttgctttccttgagctgttttctgctcctcctgatctcctacaccgtgatcctcctcgctatcagacagcgtgctgccggtagcacatccaaagcactctccacttgctctgcacatatcatggtagtgacgctgttctttggcccttgcatttttgtttatgtgcggcctttcagtaggttctctgtggacaagctgctgtctgtgttttataccatttttactccactcctgaaccccattatctacacattgagaaatgaggagatgaaagcagctatgaagaaactgcaaaaccgacgggtgacttttcaatga

SEQ ID NO: 226 - protein, 310 aa, Homo sapiens
MDPQNYSLVSEFVLHGLCTSRHLQNFFFIFFFGVYVAIMLGNLLILVTVISDPCLHSSPMYFLLGNLAFLDMWLASFATPKMIRDFLSDQKLISFGGCMAQIFFLHFTGGAEMVLLVSMAYDRYVAICKPLHYMTLMSWQTCIRLVLASWVVGFVHSISQVAFTVNLPYCGPNEVDSFFCDLPLVIKLACMDTYVLGIIMISDSGLLSLSCFLLLLISYTVILLAIRQRAAGSTSKALSTCSAHIMVVTLFFGPCIFVYVRPFSRFSVDKLLSVFYTIFTPLLNPIIYTLRNEEMKAAMKKLQNRRVTFQ

SEQ ID NO: 227 - DNA, 939 bp, Homo sapiens
  CDS (1)..(939)
atggatcttaaaaatggatctctagtgaccgagtttattttactaggattttttggacgatgggaacttcaaattttcttctttgtgacattttccctgatctacggtgctactgtgatgggaaacattctcattatggtcacagtgacatgtaggtcaacccttcattctcccttgtactttctccttggaaatctctcttttttggacatgtgtctctccactgccacaacacccaagatgatcatagatttgctcactgaccacaagaccatctctgtgtggggctgcgtgacccagatgttcttcatgcacttctttgggggtgctgagatgactcttctgataatcatggcctttgacaggtatgtagccatatgtaaacccctgcactataggacaatcatgagccacaagctgctaaaggggtttgcgatactttcatggataattggttttttacactccataagccagatagttttaacaatgaacttgcctttctgtggccacaatgtcataaacaacatattttgtgatcttccccttgtgatcaagcttgcttgcattgaaacatacaccctggaattatttgtcattgctgacagcgggctgctctctttcacctgtttcatcctcttgcttgtttcttacattgtcatcctggtcagtgtaccaaaaaaatcatcacatgggctctccaaggcgctgtccacattgtctgcccacatcattgtggtcactctgttctttggaccttgtatttttatctatgtttggccattcagtagtttggcaagcaataaaactcttgccgtattttatacagttatcacacccttactgaatccgagtatttataccctgagaaataagaaaatgcaagaggccataagaaaattacggttccaatatgttagttctgcacagaatttctag

SEQ ID NO: 228 - protein, 312 aa, Homo sapiens
MDLKNGSLVTEFILLGFFGRWELQIFFFVTFSLIYGATVMGNILIMVTVTCRSTLHSPLYFLLGNLSFLDMCLSTATTPKMIIDLLTDHKTISVWGCVTQMFFMHFFGGAEMTLLIIMAFDRYVAICKPLHYRTIMSHKLLKGFAILSWIIGFLHSISQIVLTMNLPFCGHNVINNIFCDLPLVIKLACIETYTLELFVIADSGLLSFTCFILLLVSYIVILVSVPKKSSHGLSKALSTLSAHIIVVTLFFGPCIFIYVWPFSSLASNKTLAVFYTVITPLLNPSIYTLRNKKMQEAIRKLRFQYVSSAQNF

SEQ ID NO: 229 - DNA, 840 bp, Homo sapiens
  CDS (1)..(840)
atgtatttcttccttgccaatctgtccttggtagacctctgccttccctcagccacagtccccaagatgctactgaacatccaaacccaaacccaaaccatctcctatcccggctgcctggctcagatgtatttctgtatgatgtttgccaatatggacaattttcttctcacagtgatggcatatgaccgttacgtggccatctgtcaccctttacattactccaccattatggccctgcgcctctgtgcctctctggtagctgcaccttgggtcattgccattttgaaccctctcttgcacactcttatgatggcccatctgcacttctgctctgataatgttatccaccatttcttctgtgatatcaactctctcctccctctgtcctgttccgacaccagtcttaatcagttgagtgttctggctacggtggggctgatctttgtggtaccttcagtgtgtatcctggtatcctatatcctcattgtttctgctgtgatgaaagtcccttctgcccaaggaaaactcaaggctttctctacctgtggatctcaccttgccttggtcattcttttctatggagcaatcacaggggtctatatgagccccttatccaatcactctactgaaaaagactcagccgcatcagtcatttttatggttgtagcacctgtgttgaatccattcatttacagtttaagaaacaatgaactgaaggggactttaaaaaagaccctaagccgaccgggcgcggtggctcacgcctgtaatcccagcactttgggaggccgaggcgggtggatcatgaggtcaggagatcgagaccatcctggctaa

SEQ ID NO: 230 - protein, 279 aa, Homo sapiens
MYFFLANLSLVDLCLPSATVPKMLLNIQTQTQTISYPGCLAQMYFCMMFANMDNFLLTVMAYDRYVAICHPLHYSTIMALRLCASLVAAPWVIAILNPLLHTLMMAHLHFCSDNVIHHFFCDINSLLPLSCSDTSLNQLSVLATVGLIFVVPSVCILVSYILIVSAVMKVPSAQGKLKAFSTCGSHLALVILFYGAITGVYMSPLSNHSTEKDSAASVIFMVVAPVLNPFIYSLRNNELKGTLKKTLSRPGAVAHACNPSTLGGRGGWIMRSGDRDHPG

SEQ ID NO: 231 - DNA, 951 bp, Homo sapiens
  CDS (1)..(951)
atgatctgtgaaaatcacaccagagtcactgaatttattcttcttggttttacaaacaaccccgagatgcaagtttccctctttatttttttcctggccatttatacagtcactttgttgggcaactttcttattgtcacagttaccagtgtggatctcgcacttcaaacacccatgtacttctttcttcaaaatctgtcacttcttgaagtatgtttcaccttggttatggtgccaaaaatgcttgtagatctagtgtccccaaggaaaattatctcttttgtgggctgtggtacccagatgtacttcttcttcttctttggcagttctgaatgtttccttctctccatgatggcttatgatcgctttgtggccatctgtaaccctctccattattcagtcataatgaacaggtccctatgcttgtggatggccataggctcttggatgtccggtgttcctgtgtctatgctacagacagcttggatgatggcccttcctttctgtggaccaaatgccgtggaccactttttctgtgatggtcccccagtgttaaaactagtcacagtggatacaaccatgtatgaaatgcaagcacttgcctccacactcctgtttatcatgtttcccttttgtctcattttggtttcctacacccgcattatcataacaattctgaggatgtcctctgccactggccgccagaaggcattttctacttgttcctcacacctcattgtggtgtccctcttctacggaacagccagtctgacctacctgcggcccaaatcaaaccagtcccctgagagcaagaagctagtgtcattgtcctacactgtcatcacacctatgctaaaccccatcatctacggcctgaggaacaatgaagtgaaaggggctgtcaagaggacaatcactcaaaaagtcttacagaagttagatgtgttttga

SEQ ID NO: 232 - protein, 316 aa, Homo sapiens
MICENHTRVTEFILLGFTNNPEMQVSLFIFFLAIYTVTLLGNFLIVTVTSVDLALQTPMYFFLQNLSLLEVCFTLVMVPKMLVDLVSPRKIISFVGCGTQMYFFFFFGSSECFLLSMMAYDRFVAICNPLHYSVIMNRSLCLWMAIGSWMSGVPVSMLQTAWMMALPFCGPNAVDHFFCDGPPVLKLVTVDTTMYEMQALASTLLFIMFPFCLILVSYTRIIITILRMSSATGRQKAFSTCSSHLIVVSLFYGTASLTYLRPKSNQSPESKKLVSLSYTVITPMLNPIIYGLRNNEVKGAVKRTITQKVLQKLDVF

SEQ ID NO: 233 - DNA, 942 bp, Homo sapiens
  CDS (1)..(942)
atgggtgacaggggaacaagcaatcactcagaaatgactgacttcattcttgcaggcttcagggtacgcccagagctccacattctcctcttcctgctatttttgtttgtttatgccatgatccttctagggaatgttgggatgatgaccattattatgactgatcctcggctgaacacaccaatgtattttttcctaggcaatctctccttcattgatcttttctattcatctgttattgaacccaaggctatgatcaacttctggtctgaaaacaagtctatctcctttgcaggctgtgtggcccagctctttctctttgccctcctcattgtgactgagggatttctcctggcggccatggcttatgaccgctttattgccatctgcaaccctctgctctactctgttcaaatgtccacacgtctgtgtactcagttggtggctggttcctatttttgtggctgcattagctcagttattcagactagcatgacatttactttatctttttgcgcttctcgggctgttgaccacttttactgtgattctcgcccacttcagagactgtcttgttctgatctctttatccatagaatgatatctttttccttatcatgtattattatcttgcctactatcatagtcattatagtatcttacatgtatattgtgtccacagttctaaagatacattctactgagggacataagaaggccttctccacctgcagctctcacctgggagttgtgagtgtgctgtatggtgctgtcttttttatgtatctcactcctgacagatttcctgagctgagtaaagtggcatccttatgttactccctagtcactcccatgttgaatcctttgatttactctctgaggaacaaagatgtccaagaggctctaaaaaaatttctagagaagaaaaatattattctttga

SEQ ID NO: 234 - protein, 313 aa, Homo sapiens
MGDRGTSNHSEMTDFILAGFRVRPELHILLFLLFLFVYAMILLGNVGMMTIIMTDPRLNTPMYFFLGNLSFIDLFYSSVIEPKAMINFWSENKSISFAGCVAQLFLFALLIVTEGFLLAAMAYDRFIAICNPLLYSVQMSTRLCTQLVAGSYFCGCISSVIQTSMTFTLSFCASRAVDHFYCDSRPLQRLSCSDLFIHRMISFSLSCIIILPTIIVIIVSYMYIVSTVLKIHSTEGHKKAFSTCSSHLGVVSVLYGAVFFMYLTPDRFPELSKVASLCYSLVTPMLNPLIYSLRNKDVQEALKKFLEKKNIIL

SEQ ID NO: 235 - DNA, 996 bp, Homo sapiens
  CDS (1)..(996)
atgagtcctgatgggaaccacagtagtgatccaacagagttcgtcctggcagggctcccaaatctcaacagcgcaagagtggaattattttctgtgtttcttcttgtctatctcctgaatctgacaggcaatgtgttgattgtgggggtggtaagggctgatactcgactacagacccctatgtacttctttctgggtaacctgtcctgcctagagatactgctcacttctgtcatcattccaaagatgctgagcaatttcctctcaaggcaacacactatttcctttgctgcatgtatcacccaattctatttctacttctttctcggggcctccgagttcttactgttggctgtcatgtctgcggatcgctacctggccatctgtcatcctctgcgctaccccttgctcatgagtggggctgtgtgctttcgtgtggccttggcctgctgggtggggggactcgtccctgtgcttggtcccacagtggctgtggccttgcttcctttctgtaagcagggtgctgtggtacagcacttcttctgcgacagtggcccactgctccgcctggcttgcaccaacaccaagaagctggaggagactgactttgtcctggcctccctcgtcattgtatcttccttgctgatcactgctgtgtcctacggcctcattgtgctggcagtcctgagcatcccctctgcttcaggccgtcagaaggccttctctacctgtacctcccacttgatagtggtgaccctcttctatggaagtgccatttttctctatgtgcggccatcgcagagtggttctgtggacactaactgggcagtgacagtaataacgacatttgtgacaccactgttgaatccattcatctatgccttacgtaatgagcaagtcaaggaagctttgaaggacatgtttaggaaggtagtggcaggcgttttagggaatcttttacttgataaatgtctcagtgagaaagcagtaaagtaa

SEQ ID NO: 236 - protein, 331 aa, Homo sapiens
MSPDGNHSSDPTEFVLAGLPNLNSARVELFSVFLLVYLLNLTGNVLIVGVVRADTRLQTPMYFFLGNLSCLEILLTSVIIPKMLSNFLSRQHTISFAACITQFYFYFFLGASEFLLLAVMSADRYLAICHPLRYPLLMSGAVCFRVALACWVGGLVPVLGPTVAVALLPFCKQGAVVQHFFCDSGPLLRLACTNTKKLEETDFVLASLVIVSSLLITAVSYGLIVLAVLSIPSASGRQKAFSTCTSHLIVVTLFYGSAIFLYVRPSQSGSVDTNWAVTVITTFVTPLLNPFIYALRNEQVKEALKDMFRKVVAGVLGNLLLDKCLSEKAVK

SEQ ID NO: 237 - DNA, 831 bp, Homo sapiens
  CDS (1)..(831)
atgcgaagaaagaacctcacagaggtaacagagtttgttttcctgggattctccagattccacaaacatcacatcactctctttgtggtttttctcatcctgtacacattaactgtggctggcaatgccatcatcatgaccatcatctgcattgaccgtcacctccacactcccatgtacttcttcctgagcatgctggctagctcaaagacagtgtacacactgttcatcattccacagatgctctccagcttcgtaacccagacccagccaatctccctagccggttgtaccacccaaacgttcttctttgttaccttggccatcaacaattgcttcttgctcacagtgatgggctatgaccactatatggccatctgcaatcccttgagatacagggtcattacgagcaagaaggtgtgtgtccagctggtgtgtggagcctttagcattggcctggccatggcagctgtccaggtaacatccatatttaccttacctttttgtcacacggtggttggtcatttcttctgtgacatcctccctgtcatgaaactctcctgtattaataccactatcaatgagataatcaattttgttgtcaggttatttgtcatcctggtccccatgggtctggtcttcatctcctatgtcctcatcatctccactgtcctcaagattgcctcagctgagggttggaagaagacctttgccacctgtgccttccacctcactgtggtcattgtccattatggctgtgcttccattgcctacctcatgcccaagtcagaaaactctatagaacaagacctccttctctcagtgacctaa

SEQ ID NO: 238 - protein, 276 aa, Homo sapiens
MRRKNLTEVTEFVFLGFSRFHKHHITLFVVFLILYTLTVAGNAIIMTIICIDRHLHTPMYFFLSMLASSKTVYTLFIIPQMLSSFVTQTQPISLAGCTTQTFFFVTLAINNCFLLTVMGYDHYMAICNPLRYRVITSKKVCVQLVCGAFSIGLAMAAVQVTSIFTLPFCHTVVGHFFCDILPVMKLSCINTTINEIINFVVRLFVILVPMGLVFISYVLIISTVLKIASAEGWKKTFATCAFHLTVVIVHYGCASIAYLMPKSENSIEQDLLLSVT

SEQ ID NO: 239 - DNA, 930 bp, Homo sapiens
  CDS (1)..(930)
atgaagagaaagaacttcacagaagtgtcagaattcattttcttgggattttctagctttggaaagcatcagataaccctctttgtggttttcctaactgtctacattttaactctggttgctaacatcatcattgtgactatcatctgcattgaccatcatctccacactcccatgtatttcttcctaagcatgctggctagttcagagacggtgtacacactggtcattgtgccacgaatgcttttgagcctcatttttcataaccaacctatctccttggcaggctgtgctacacaaatgttcttttttgttatcttggccactaataattgcttcctgcttactgcaatggggtatgaccgctatgtggccatctgcagacccctgagatacactgtcatcatgagcaagggactatgtgcccagctggtgtgtgggtcctttggcattggtctgactatggcagttctccatgtgacagccatgttcaatttgccgttctgtggcacagtggtagaccacttcttttgtgacatttacccagtcatgaaactttcttgcattgataccactatcaatgagataataaattatggtgtaagttcatttgtgatttttgtgcccataggcctgatatttatctcctatgtccttgtcatctcttccatccttcaaattgcctcagctgagggccggaagaagacctttgccacctgtgtctcccacctcactgtggttattgtccactgtggctgtgcctccattgcctacctcaagccgaagtcagaaagttcaatagaaaaagaccttgttctctcagtgacgtacaccatcatcactcccttgctgaaccctgttgtttacagtctgagaaacaaggaggtaaaggatgccctatgcagagttgtgggcagaaatatttcttaa

SEQ ID NO: 240 - protein, 309 aa, Homo sapiens
MKRKNFTEVSEFIFLGFSSFGKHQITLFVVFLTVYILTLVANIIIVTIICIDHHLHTPMYFFLSMLASSETVYTLVIVPRMLLSLIFHNQPISLAGCATQMFFFVILATNNCFLLTAMGYDRYVAICRPLRYTVIMSKGLCAQLVCGSFGIGLTMAVLHVTAMFNLPFCGTVVDHFFCDIYPVMKLSCIDTTINEIINYGVSSFVIFVPIGLIFISYVLVISSILQIASAEGRKKTFATCVSHLTVVIVHCGCASIAYLKPKSESSIEKDLVLSVTYTIITPLLNPVVYSLRNKEVKDALCRVVGRNIS

SEQ ID NO: 241 - DNA, 936 bp, Homo sapiens
  CDS (1)..(936)
atggaaaaaataaacaacgtaactgaattcattttctggggtctttctcagagcccagagattgagaaagtttgttttgtggtgttttctttcttctacataatcattcttctgggaaatctcctcatcatgctgacagtttgcctgagcaacctgtttaagtcacccatgtatttctttctcagcttcttgtcttttgtggacatttgttactcttcagtcacagctcccaagatgattgttgacctgttagcaaaggacaaaaccatctcctatgtggggtgcatgttgcaactgcttggagtacatttctttggttgcactgagatcttcatccttactgtaatggcctatgatcgttatgtggctatctgtaaacccctacattatatgaccatcatgaaccgggagacatgcaataaaatgttattagggacgtgggtaggtgggttcttacactccattatccaagtggctctggtagtccaactacccttttgtggacccaatgagatagatcactacttttgtgatgttcaccctgtgttgaaacttgcctgcacagaaacatacattgttggtgttgttgtgacagccaacagtggtaccattgctctggggagttttgttatcttgctaatctcctacagcatcatcctagtttccctgagaaagcagtcagcagaaggcaggcgcaaagccctctccacctgtggctcccacattgccatggtcgttatctttttcggcccctgtacttttatgtacatgcgccctgatacgaccttttcagaggataagatggtggctgtattttacaccattatcactcccatgttaaatcctctgatttatacactgagaaatgcagaagtaaagaatgcaatgaagaaactgtggggcagaaatgttttcttggaggctaaagggaaatag

SEQ ID NO: 242 - protein, 311 aa, Homo sapiens
MEKINNVTEFIFWGLSQSPEIEKVCFVVFSFFYIIILLGNLLIMLTVCLSNLFKSPMYFFLSFLSFVDICYSSVTAPKMIVDLLAKDKTISYVGCMLQLLGVHFFGCTEIFILTVMAYDRYVAICKPLHYMTIMNRETCNKMLLGTWVGGFLHSIIQVALVVQLPFCGPNEIDHYFCDVHPVLKLACTETYIVGVVVTANSGTIALGSFVILLISYSIILVSLRKQSAEGRRKALSTCGSHIAMVVIFFGPCTFMYMRPDTTFSEDKMVAVFYTIITPMLNPLIYTLRNAEVKNAMKKLWGRNVFLEAKGK

SEQ ID NO: 243 - DNA, 1053 bp, Homo sapiens
  CDS (1)..(1053)
atgactatgataccacaaattgatctgaagcaaattttcctttgtcctaattgcagactatacatgatccctgttggagctttcatcttttccttgggaaacatgcaaaaccaaagctttgtaactgagtttgtcctcctgggactttcacagaatccaaatgttcaggaaatagtatttgttgtatttttgtttgtctacattgcaactgttgggggcaacatgctaattgtagtaaccattctcagcagccctgctcttctggtgtctcctatgtacttcttcttgggcttcctgtccttcctggatgcgtgcttctcatctgtcatcaccccaaagatgattgtagactccctctatgtgacaaaaaccatctcttttgaaggctgcatgatgcagctctttgctgaacacttctttgctggggtggaggtgattgtcctcacagccatggcctatgatcgttatgtggccatttgcaagcccttgcattactcttctatcatgaacaggaggctctgtggcattctgatgggggtagcctggacagggggcctcttgcattccatgatacaaattctttttactttccagcttcccttttgtggccccaatgtcatcaatcactttatgtgtgacttgtacccgttactggagcttgcctgcactgatactcacatctttggcctcatggtggtcatcaacagtgggtttatctgcatcataaacttctccttgttgcttgtctcctatgctgtcatcttgctctctctgagaacacacagttctgaagggcgctggaaagctctctccacctgtggatctcacattgctgttgtgattttgttctttgtcccatgcatatttgtatatacacgacctccatctgctttttcccttgacaaaatggcggcaatattttatatcatcttaaatcccttgctcaatcctttgatttacactttcaggaataaggaagtaaaacaggccatgaggagaatatggaacagactgatggtggtttctgatgagaaagaaaatattaaactttaa

SEQ ID NO: 244 - protein, 350 aa, Homo sapiens
MTMIPQIDLKQIFLCPNCRLYMIPVGAFIFSLGNMQNQSFVTEFVLLGLSQNPNVQEIVFVVFLFVYIATVGGNMLIVVTILSSPALLVSPMYFFLGFLSFLDACFSSVITPKMIVDSLYVTKTISFEGCMMQLFAEHFFAGVEVIVLTAMAYDRYVAICKPLHYSSIMNRRLCGILMGVAWTGGLLHSMIQILFTFQLPFCGPNVINHFMCDLYPLLELACTDTHIFGLMVVINSGFICIINFSLLLVSYAVILLSLRTHSSEGRWKALSTCGSHIAVVILFFVPCIFVYTRPPSAFSLDKMAAIFYIILNPLLNPLIYTFRNKEVKQAMRRIWNRLMVVSDEKENIKL

SEQ ID NO: 245 - DNA, 981 bp, Homo sapiens
  CDS (1)..(981)
atgtcatttcaggtgacttatatgttctatctacactggaccatggaaaaaagcaataatagcactttgtttattctcttggggttttcccaaaataagaacattgaagtcctctgctttgtattatttttgttttgctacattgctatttggatgggaaacttactcataatgatttctatcacgtgcacccagctcattcaccaacccatgtatttcttcctcaattacctctcactctccgacctttgctacacatccacagtgacccccaaattaatggttgacttactggcagaaagaaagaccatttcctataataactgtatgatacaactctttaccacccatttttttggaggcatagagatcttcattctcacagggatggcctatgaccgctatgtggccatttgcaagcccctgcactacaccattattatgagcaggcaaaagtgtaacacaatcatcatagtttgttgtactgggggatttatacattctgccagtcagtttcttctcaccatctttgtaccattttgtggcccaaatgagatagatcactacttctgtgatgtgtatcctttgctgaaattggcctgttctaatatacacatgataggtctcttagtcattgctaattcaggcttaattgctttggtgacatttgttgtcttgttgttgtcttatgtttttatattgtataccatcagagcatactctgcagagagacgcagcaaagctcttgccacttgtagttctcatgtaattgttgtggtcctgttttttgctcctgcattgttcatttacattagaccggtcacaacattctcagaagataaagtgtttgcccttttttataccatcattgctcccatgttcaaccctctcatatacacgctgagaaacacagagatgaagaacgccatgaggaaagtgtggtgttgtcaaatactcctgaaaagaaatcaacttttctga

SEQ ID NO: 246 - protein, 326 aa, Homo sapiens
MSFQVTYMFYLHWTMEKSNNSTLFILLGFSQNKNIEVLCFVLFLFCYIAIWMGNLLIMISITCTQLIHQPMYFFLNYLSLSDLCYTSTVTPKLMVDLLAERKTISYNNCMIQLFTTHFFGGIEIFILTGMAYDRYVAICKPLHYTIIMSRQKCNTIIIVCCTGGFIHSASQFLLTIFVPFCGPNEIDHYFCDVYPLLKLACSNIHMIGLLVIANSGLIALVTFVVLLLSYVFILYTIRAYSAERRSKALATCSSHVIVVVLFFAPALFIYIRPVTTFSEDKVFALFYTIIAPMFNPLIYTLRNTEMKNAMRKVWCCQILLKRNQLF

SEQ ID NO: 247 - DNA, 1014 bp, Homo sapiens
  CDS (1)..(1014)
  modified_base (333)..(432): a, t, c, g, other or unknown
atggaggcagaaataaagatgttatttgaaaccaatgagacaaaagacacaacataccagaatctctgggacaccttcaaagcagtgtgtagagggaaatttatagcactaaatgcccgcaagagaaagcagaaaagatctaaaattgacactctcacatcacaattaaaagaactagagaagcaagagcaaacacattcaaaagctagcagaaggcaagaaataactaagatcagagcagaactgaaggaaatagagacacaaaaaacccttcaaaaaatcaatgaatccaggagcaggttttttgaaaagatcaacaaaattgatcgaccnnnnnnnnnnnnnnnnnnnnnnnnnnnnnnnnnnnnnnnnnnnnnnnnnnnnnnnnnnnnnnnnnnnnnnnnnnnnnnnnnnnnnnnnnnnnnnnnnnnngttgaccgctatgtggacatctgtaagcccttgcactacatgaccatcataagccagtgggtctgtggtgttttgatggctgtggcctgggtgggatcctgtgtgcattctttagttcagatttttcttgccctgagtttgccattctgtggccccaatgtgatcaatcactgtttctgtgacttgcagcccttgttgaaacaagcctgttcagaaacctatgtggttaacctactcctggtttccaatagtggggccatttgtgcagtgagttatgtcatgctaatattctcctatgtcatcttcttgcattctctgagaaaccacagtgctgaagtgataaagaaagcactttccacatgtgtctcccacatcattgtggtcatcttgttctttggaccttgcatatttatgtacacatgccctgcaaccgtattccccatggataagatgatagctgtattttatacagttggaacatcttttctcaaccctgtgatttacacgctgaagaatacagaagtgaaaagtgccatgaggaagctttggagcaagaaattgatcacagatgacaaaagataa

SEQ ID NO: 248 - protein, 337 aa, Homo sapiens
  MOD_RES (112)..(144): Variable amino acid
MEAEIKMLFETNETKDTTYQNLWDTFKAVCRGKFIALNARKRKQKRSKIDTLTSQLKELEKQEQTHSKASRRQEITKIRAELKEIETQKTLQKINESRSRFFEKINKIDRPXXXXXXXXXXXXXXXXXXXXXXXXXXXXXXXXXVDRYVDICKPLHYMTIISQWVCGVLMAVAWVGSCVHSLVQIFLALSLPFCGPNVINHCFCDLQPLLKQACSETYVVNLLLVSNSGAICAVSYVMLIFSYVIFLHSLRNHSAEVIKKALSTCVSHIIVVILFFGPCIFMYTCPATVFPMDKMIAVFYTVGTSFLNPVIYTLKNTEVKSAMRKLWSKKLITDDKR

SEQ ID NO: 249 - DNA, 834 bp, Homo sapiens
  CDS (1)..(834)
atgggcaacctccttatcatggtgaccatcatggccagccagtccctgggttcccccatgtacttttttctggcttctttatcatttatacataccgtctattatactgccattgctcccaaaatgattgttgacctgctctctgagaaaaagaccatttcttttcagggttgtatggctcaactttttatggatcatttatttgctggtgctgaagtcattcttctggtggtaatggcctatgatcaatatgtggccatctgtaagcctcttcattatttgatcatcatgaattgtcgagtctgtgttctcatgctgttggtggcctggattggaggctttcttcactcattggttcaatttctctttatttatcagctccctttctgtggacccaatgtcattgacaacttcctgtgtgatttgtatcccttattgaaacttgcttgcaccaatacctatgtcactgggctttctatgatagctaatggtggagcgatttgtactgtcaccttcttccctctcctgctttcctatggggtcatattaccctctcttaagactcagagtttggaagggaaatgcaaagctttctacacctgtgcatcccacatcactgtgatcactttattctttgtcccctgcatcttcctgttagcaaggcccaactccacctttcccattgataaatccatgactgtggttttaacttgtataactcccatgctgaaaccactaatctatgccctgaggaatgcagaaatgaaaagtgccatgaggaaactttggagtgaaaaagtaagcttagctggaaaagggctgtatccctcatga

SEQ ID NO: 250 - protein, 277 aa, Homo sapiens
MGNLLIMVTIMASQSLGSPMYFFLASLSFIHTVYYTAIAPKMIVDLLSEKKTISFQGCMAQLFMDHLFAGAEVILLVVMAYDQYVAICKPLHYLIIMNCRVCVLMLLVAWIGGFLHSLVQFLFIYQLPFCGPNVIDNFLCDLYPLLKLACTNTYVTGLSMIANGGAICTVTFFPLLLSYGVILPSLKTQSLEGKCKAFYTCASHITVITLFFVPCIFLLARPNSTFPIDKSMTVVLTCITPMLKPLIYALRNAEMKSAMRKLWSEKVSLAGKGLYPS

SEQ ID NO: 251 - DNA, 990 bp, Homo sapiens
  CDS (1)..(990)
atgcaattagttctattacttatgtttctccttgtctttataggcaatactgcacctgcattctcagtgaccttggaatctatggacataccacaaaatatcacagaatttttcatgctggggctctcacagaactcagaggtacagagagttctctttgtggtctttttgctgatctatgtggtcacggtttgtggcaacatgctcattgtggtcactatcacctccagccccacgctggcttcccctgtgtattttttcctggccaacctatcctttattgacaccttttattcttcttctatggctcctaaactcattgctgactcattgtatgaggggagaaccatctcttatgagtgctgcatggctcagctctttggagctcattttttgggaggtgttgagatcattctgctcacagtgatggcttatgaccgctatgtggccatctgtaagcccctgcacaatactaccatcatgaccaggcatctctgtgccatgcttgtaggggtggcttggcttgggggcttcctgcattcattggttcagctcctcctggtcctttggttgcccttctgtgggcccaatgtgatcaatcactttgcctgtgacttgtaccctttgctggaagttgcctgcaccaatacgtatgtcattggtctgctggtggttgccaacagtggtttaatctgcctgttgaacttcctcatgctggctgcctcctacattgtcatcctgtactccttgaggtcccacagtgcagatgggagatgcaaagccctctccacctgtggagcccacttcattgttgttgccttgttctttgtgccctgtatatttacttatgtgcatccattttctactttacctatagacaaaaatatggcattattttatggtattctgacacctatgttgaatccactcatttataccctgagaaatgaagaggtaaaaaatgccatgagaaagctctttacatggtaa

SEQ ID NO: 252 - protein, 329 aa, Homo sapiens
MQLVLLLMFLLVFIGNTAPAFSVTLESMDIPQNITEFFMLGLSQNSEVQRVLFVVFLLIYVVTVCGNMLIVVTITSSPTLASPVYFFLANLSFIDTFYSSSMAPKLIADSLYEGRTISYECCMAQLFGAHFLGGVEIILLTVMAYDRYVAICKPLHNTTIMTRHLCAMLVGVAWLGGFLHSLVQLLLVLWLPFCGPNVINHFACDLYPLLEVACTNTYVIGLLVVANSGLICLLNFLMLAASYIVILYSLRSHSADGRCKALSTCGAHFIVVALFFVPCIFTYVHPFSTLPIDKNMALFYGILTPMLNPLIYTLRNEEVKNAMRKLFTW

SEQ ID NO: 253 - DNA, 930 bp, Homo sapiens
  CDS (1)..(930)
atgggtgccaagaacaatgtgactgagtttgttttatttggcctttttgagagcagagagatgcagcatacatgctttgtggtattcttcctctttcatgtgctcactgtcctggggaaccttctggtcatcatcaccatcaatgctagaaagaccctgaagtctcccatgtatttcttcctgagccagttgtcttttgctgacatatgttatccatccactaccatacccaagatgattgctgacacttttgtggagcataagatcatctccttcaatggctgcatgacccagctcttttctgcccacttctttggtggcactgagatcttcctccttacagccatggcctatgaccgctatgtggccatctgtaggcccctgcactacacagccatcatggattgccggaagtgtggcctgctagcgggggcctcctggttagctggcttcctgcattccatcctgcagaccctcctcacggttcagctgcctttttgtgggcccaatgagatagacaacttcttctgtgatgttcatcccctgctcaagttggcctgtgcagacacctacatggtaggtctcatcgtggtggccaacagcggtatgatttctttagcatccttttttatccttatcatttcctatgttatcatcttactgaacctaagaagccagtcatctgaggaccggcgtaaggctgtctccacatgtggctcacacgtaatcactgtccttttggttctcatgccccccatgttcatgtacattcgtccctccaccaccctggctgctgacaaacttatcatcctctttaacattgtgatgccacctttgctgaaccctttgatctatacactaaggaacaacgatgtgaaaaatgccatgaggaagctgtttagggtcaagaggagcttaggggagaagtga

SEQ ID NO: 254 - protein, 309 aa, Homo sapiens
MGAKNNVTEFVLFGLFESREMQHTCFVVFFLFHVLTVLGNLLVIITINARKTLKSPMYFFLSQLSFADICYPSTTIPKMIADTFVEHKIISFNGCMTQLFSAHFFGGTEIFLLTAMAYDRYVAICRPLHYTAIMDCRKCGLLAGASWLAGFLHSILQTLLTVQLPFCGPNEIDNFFCDVHPLLKLACADTYMVGLIVVANSGMISLASFFILIISYVIILLNLRSQSSEDRRKAVSTCGSHVITVLLVLMPPMFMYIRPSTTLAADKLIILFNIVMPPLLNPLIYTLRNNDVKNAMRKLFRVKRSLGEK

SEQ ID NO: 255 - DNA, 1080 bp, Homo sapiens
  CDS (1)..(1080)
atgaataacatagctcaacttagtcttgggtttatagatttagggattccatcagtgttacagaaaataatcctgaccaaaattattttattgttcaaaatgtatgtgtcaaattgcaatccttgtgctattcacagaaaaatcaattatccaaataccaaactggatttcgagcaagtgaacaacataacggaattcatcttgcttggcctgacacagaacgcagaggcacagaaactcttgtttgctgtgtttacactcatctactttctcaccatggtagacaacctaatcattgtggtgacaatcaccaccagcccagccctggactcccccgtgtatttttttctgtctttcttttccttcatagatggctgctcctcttctaccatggcccccaaaatgatatttgacttactcactgaaaagaaaactatttccttcagtgggtgcatgacccagctctttgtagaacatttctttgggggagttgagatcattctgctcgtggtgatggcctatgactgctatgtggccatctgcaagcccctgtactacctgatcacaatgaacaggcaggtatgtggcctcctggtggccatggcatgggtcgggggatttcttcacgctctgattcaaatgcttttaatagtctggctgcccttctgtggccccaatgtcattgaccatttcatctgtgaccttttccctctgctaaaactctcctgcactgacactcacgtctttggactctttgttgccgccaacagtgggctgatgtgtatgctcattttttctattcttattacctcttacgtcctaatcctctgctcacagcggaaggctctctctacctgcgccttccatatcactgtagtcgtcctattctttgttccctgtatattggtgtaccttcgacccatgatcaccttccctattgataaagctgtgtctgtgttttatactgtggtaacacccatgttaaaccctttaatctacaccctcagaaacacagaggtgaaaaatgccatgaagcagctctggagccaaataatctggggtaacaatttgtgtgattag

SEQ ID NO: 256 - protein, 359 aa, Homo sapiens
MNNIAQLSLGFIDLGIPSVLQKIILTKIILLFKMYVSNCNPCAIHRKINYPNTKLDFEQVNNITEFILLGLTQNAEAQKLLFAVFTLIYFLTMVDNLIIVVTITTSPALDSPVYFFLSFFSFIDGCSSSTMAPKMIFDLLTEKKTISFSGCMTQLFVEHFFGGVEIILLVVMAYDCYVAICKPLYYLITMNRQVCGLLVAMAWVGGFLHALIQMLLIVWLPFCGPNVIDHFICDLFPLLKLSCTDTHVFGLFVAANSGLMCMLIFSILITSYVLILCSQRKALSTCAFHITVVVLFFVPCILVYLRPMITFPIDKAVSVFYTVVTPMLNPLIYTLRNTEVKNAMKQLWSQIIWGNNLCD

SEQ ID NO: 257 - DNA, 930 bp, Homo sapiens
  CDS (1)..(930)
atggaaaatcaaaacaatgtgactgaattcattcttctgggtctcacagagaacctggagctgtggaaaatattttctgctgtgtttcttgtcatgtatgtagccacagtgctggaaaatctacttattgtggtaactattatcacaagtcagagtctgaggtcacctatgtatttttttcttaccttcttgtcccttttggatgtcatgttctcatctgtcgttgcccccaaggtgattgtagacaccctctccaagagcactaccatctctctcaaaggctgcctcacccagctgtttgtggagcatttctttggtggtgtggggatcatcctcctcactgtgatggcctatgaccgctacgtggccatctgtaagcccctgcactacacgatcatcatgagtccacgggtgtgctgcctaatggtaggaggggcttgggtggggggatttatgcacgcaatgatacaacttctcttcatgtatcaaatacccttctgtggtcctaatatcatagatcactttatatgtgatttgtttcagttgttgacacttgcctgcacggacacccacatcctgggcctcttagttaccctcaacagtgggatgatgtgtgtggccatctttcttatcttaattgcgtcctacacggtcatcctatgctccctgaagtcttacagctctaaagggcggcacaaagccctctctacctgcagctcccacctcacggtggttgtattgttctttgtcccctgtattttcttgtacatgaggcctgtggtcactcaccccatagacaaggcaatggctgtgtcagactcaatcatcacacccatgttaaatcccttgatctatacactgaggaatgcagaggtgaaaagtgccatgaagaaactctggatgaaatgggaggctttggctgggaaataa

SEQ ID NO: 258 - protein, 309 aa, Homo sapiens
MENQNNVTEFILLGLTENLELWKIFSAVFLVMYVATVLENLLIVVTIITSQSLRSPMYFFLTFLSLLDVMFSSVVAPKVIVDTLSKSTTISLKGCLTQLFVEHFFGGVGIILLTVMAYDRYVAICKPLHYTIIMSPRVCCLMVGGAWVGGFMHAMIQLLFMYQIPFCGPNIIDHFICDLFQLLTLACTDTHILGLLVTLNSGMMCVAIFLILIASYTVILCSLKSYSSKGRHKALSTCSSHLTVVVLFFVPCIFLYMRPVVTHPIDKAMAVSDSIITPMLNPLIYTLRNAEVKSAMKKLWMKWEALAGK

SEQ ID NO: 259 - DNA, 936 bp, Homo sapiens
  CDS (1)..(936)
atgggcaaggaaaactgcaccactgtggctgagttcattctccttggactatcagatgtccctgagttgagagtctgcctcttcctgctgttccttctcatctatggagtcacgttgttagccaacctgggcatgattgcactgattcaggtcagctctcggctccacacccccatgtactttttcctcagccacttgtcctctgtagatttctgctactcctcaataattgtgccaaaaatgttggctaatatctttaacaaggacaaagccatctccttcctagggtgcatggtgcaattctacttgttttgcacttgtgtggtcactgaggtcttcctgctggccgtgatggcctatgaccgctttgtggccatctgtaaccctttgctatacacagtcaccatgtcttggaaggtgcgtgtggagctggcttcttgctgctacttctgtgggacggtgtgttctctgattcatttgtgcttagctcttaggatccccttctatagatctaatgtgattaaccactttttctgtgatctacctcctgtcttaagtcttgcttgctctgatatcactgtgaatgagacactgctgttcctggtggccactttgaatgagagtgttaccatcatgatcatcctcacctcctacctgctaattctcaccaccatcctgaagatgggctctgcagagggcaggcacaaagccttctccacctgtgcttcccacctcacagctatcactgtcttccatggaacagtcctttccatttattgcaggcccagttcaggcaatagtggagatgctgacaaagtggccaccgtgttctacacagtcgtgattcctatgctgaactctgtgatctacagcctgagaaataaagatgtgaaagaagctctcagaaaagtgatgggctccaaaattcactcctag

SEQ ID NO: 260 - protein, 311 aa, Homo sapiens
MGKENCTTVAEFILLGLSDVPELRVCLFLLFLLIYGVTLLANLGMIALIQVSSRLHTPMYFFLSHLSSVDFCYSSIIVPKMLANIFNKDKAISFLGCMVQFYLFCTCVVTEVFLLAVMAYDRFVAICNPLLYTVTMSWKVRVELASCCYFCGTVCSLIHLCLALRIPFYRSNVINHFFCDLPPVLSLACSDITVNETLLFLVATLNESVTIMIILTSYLLILTTILKMGSAEGRHKAFSTCASHLTAITVFHGTVLSIYCRPSSGNSGDADKVATVFYTVVIPMLNSVIYSLRNKDVKEALRKVMGSKIHS

SEQ ID NO: 261 - DNA, 945 bp, Homo sapiens
  CDS (1)..(945)
atgatggcatctgaaagaaatcaaagcagcacacccacttttattctcttgggtttttcagaatacccagaaatccaggttccactctttctggttttcttgttcgtctacacagtcactgtagtggggaacttgggcatgataataatcatcagactcaattcaaaactccatacaatcatgtgctttttccttagtcacttgtccttgacagacttctgtttttccactgtagttacacctaaactgttggagaacttggttgtggaatacagaaccatctctttctctggttgcatcatgcaattttgttttgcttgcatttttggagtgacagaaactttcatgttagcagcgatggcttatgaccgttttgtggcagtttgtaaacccttgctgtataccactattatgtctcagaagctctgtgctcttctggtggctgggtcctatacatgggggatagtgtgctccctgatactcacatattttcttcttgacttatcgttttgtgaatctaccttcataaataattttatctgtgaccactctgtaattgtttctgcctcctactcagacccctatatcagccagaggctatgctttattattgccatattcaatgaggtgagcagcctaattatcattctgacatcatatatgcttattttcactaccattatgaagatgcgatctgcaagtgggcgccagaaaactttctccacctgtgcctcccacctgacagccatcactatcttccatggaactatccttttcctttactgtgttcctaatcctaaaacttctagcctcatagttacagtggcttctgtgttttacacagtggcgattccaatgctgaacccattgatctacagccttaggaacaaagatatcaataacatgtttgaaaaattagttgtcaccaaattgatttaccactga

SEQ ID NO: 262 - protein, 314 aa, Homo sapiens
MMASERNQSSTPTFILLGFSEYPEIQVPLFLVFLFVYTVTVVGNLGMIIIIRLNSKLHTIMCFFLSHLSLTDFCFSTVVTPKLLENLVVEYRTISFSGCIMQFCFACIFGVTETFMLAAMAYDRFVAVCKPLLYTTIMSQKLCALLVAGSYTWGIVCSLILTYFLLDLSFCESTFINNFICDHSVIVSASYSDPYISQRLCFIIAIFNEVSSLIIILTSYMLIFTTIMKMRSASGRQKTFSTCASHLTAITIFHGTILFLYCVPNPKTSSLIVTVASVFYTVAIPMLNPLIYSLRNKDINNMFEKLVVTKLIYH

SEQ ID NO: 263 - DNA, 945 bp, Homo sapiens
  CDS (1)..(945)
atgatgatggttttaaggaatctgagcatggagcccacctttgcccttttaggtttcacagattacccaaagcttcagattcctctcttccttgtgtttctgctcatgtatgttatcacagtggtaggaaaccttgggatgatcataataatcaagattaaccccaaatttcacactcctatgtactttttccttagtcacctctcttttgttgatttttgttactcttccattgtcactcccaagctgcttgagaacttggtaatggcagataaaagcatcttctactttagctgcatgatgcagtacttcctgtcctgcactgctgtggtgacagagtctttcttgctggcagtgatggcctatgaccgctttgtggccatctgcaatcctctgctttatacagtggccatgtcacagaggctctgtgccctgctggtggctgggtcatatctctggggcatgtttggccccttggtactcctttgttatgctctccggttaaacttctctggacctaatgtaatcaaccacttcttttgtgagtatactgctctcatctctgtgtctggctctgatatactcatcccccacctgctgcttttcagcttcgccaccttcaatgagatgtgtacactactgatcatcctcacttcctatgttttcatttttgtgactgtactaaaaatccgttctgttagtgggcgccacaaagccttctccacctgggcctcccacctgacttctatcaccatcttccatgggaccatccttttcctttactgtgtacccaactccaaaaactctcggcaaacagtcaaagtggcctctgtattttacacagttgtcaaccccatgctgaaccctctgatctacagcctaaggaataaagacgtgaaggatgctttctggaagttaatacatacacaagttccatttcactga

SEQ ID NO: 264 - protein, 314 aa, Homo sapiens
MMMVLRNLSMEPTFALLGFTDYPKLQIPLFLVFLLMYVITVVGNLGMIIIIKINPKFHTPMYFFLSHLSFVDFCYSSIVTPKLLENLVMADKSIFYFSCMMQYFLSCTAVVTESFLLAVMAYDRFVAICNPLLYTVAMSQRLCALLVAGSYLWGMFGPLVLLCYALRLNFSGPNVINHFFCEYTALISVSGSDILIPHLLLFSFATFNEMCTLLIILTSYVFIFVTVLKIRSVSGRHKAFSTWASHLTSITIFHGTILFLYCVPNSKNSRQTVKVASVFYTVVNPMLNPLIYSLRNKDVKDAFWKLIHTQVPFH

SEQ ID NO: 265 - DNA, 942 bp, Homo sapiens
  CDS (1)..(942)
atgctgctgactgatagaaatacaagtgggaccacgttcaccctcttgggcttctcagattacccagaactgcaagtcccactcttcctggtttttctggccatctacaatgtcactgtgctagggaatattgggttgattgtgatcatcaaaatcaaccccaaactgcatacccccatgtactttttcctcagccaactctcctttgtggatttctgctattcctccatcattgctcccaagatgttggtgaaccttgttgtcaaagacagaaccatttcatttttaggatgcgtagtacaattctttttcttctgtacctttgtggtcactgaatcctttttattagctgtgatggcctatgaccgcttcgtggccatttgcaaccctctgctctacacagttaacatgtcccagaaactctgcgtgctgctggttgtgggatcctatgcctggggagtctcatgttccttggaactgacgtgctctgctttaaagttatgttttcatggtttcaacacaatcaatcacttcttctgtgagttctcctcactactctccctttcttgctctgatacttacatcaaccagtggctgctattctttcttgccacctttaatgaaatcagcacactactcatcgttctcacatcttatgcgttcattgttgtaaccatcctcaagatgcgttcagtcagtgggcgccgcaaagccttctccacctgtgcctcccacctgactgccatcaccatcttccatggcaccatcctcttcctttactgtgtgcccaactccaaaaactccaggcacacagtcaaagtggcctctgtgttttacaccgtggtgatccccatgttgaatcccctgatctacagtctgagaaataaagatgtcaaggatacagtcaccgagatactggacaccaaagtcttctcttactga

SEQ ID NO: 266 - protein, 313 aa, Homo sapiens
MLLTDRNTSGTTFTLLGFSDYPELQVPLFLVFLAIYNVTVLGNIGLIVIIKINPKLHTPMYFFLSQLSFVDFCYSSIIAPKMLVNLVVKDRTISFLGCVVQFFFFCTFVVTESFLLAVMAYDRFVAICNPLLYTVNMSQKLCVLLVVGSYAWGVSCSLELTCSALKLCFHGFNTINHFFCEFSSLLSLSCSDTYINQWLLFFLATFNEISTLLIVLTSYAFIVVTILKMRSVSGRRKAFSTCASHLTAITIFHGTILFLYCVPNSKNSRHTVKVASVFYTVVIPMLNPLIYSLRNKDVKDTVTEILDTKVFSY

SEQ ID NO: 267 - DNA, 771 bp, Homo sapiens
  CDS (1)..(771)
atgtactttttcctcagtcatctatcctttttggatacttgttattccaatgtatttacacccaaactgttagagattttggttgtggaagacagaactatctccttcaaaggatgcatggtacaatttttctttggttgtgcatttgtaatcacagaaatgttcatgttagcggtgatggcttatgacttgtttatggctgtttgtaaccccctgctctacacagtggctatgtctcctaagctctgtgctctcctggtaactggaacttacacatggggtggactctgttccctgacactcacttattctcttttggtgttatcctactgtggatctaacatcataaatcactttggctgtgagtactctgccattctttctctatcctgctctgatccctacttcaaccagatggcgtgtttagtcatttctatattcagtgaagcttgtagcctcctggccatccttgccttctatgtcttcatagttgccactgtcatcaagatgctttctacgggtggaccccaaaaggccatctccacctgtgcctcccacctgaccaccgtctccattttccatggggtcatcctgctcctttactgtgtgcccaactccaaaagctcatggctcctggtcaaagtggctactgtactttttacagtcataatccctatgctgaatcccctgatctacagccttaggaacaaagatgtaaaagagaccgtcaggaagttgataaactcccaatcaccttttcactcaaaataa

SEQ ID NO: 268 - protein, 256 aa, Homo sapiens
MYFFLSHLSFLDTCYSNVFTPKLLEILVVEDRTISFKGCMVQFFFGCAFVITEMFMLAVMAYDLFMAVCNPLLYTVAMSPKLCALLVTGTYTWGGLCSLTLTYSLLVLSYCGSNIINHFGCEYSAILSLSCSDPYFNQMACLVISIFSEACSLLAILAFYVFIVATVIKMLSTGGPQKAISTCASHLTTVSIFHGVILLLYCVPNSKSSWLLVKVATVLFTVIIPMLNPLIYSLRNKDVKETVRKLINSQSPFHSK

SEQ ID NO: 269 - DNA, 987 bp, Homo sapiens
  CDS (1)..(987)
atgaagctgtggatggagagtcacctgatagtcccagaaacccgtcccagcccaaggatgatgagtaaccagacgttggtaaccgagttcatcctgcagggcttttcggagcacccagaataccgggtgttcttattcagctgtttcctcttcctctactctggggccctcacaggtaatgtcctcatcaccttggccatcacgttcaaccctgggctccacgctcctatgtactttttcttactcaacttggctactatggacattatctgcacctcttccatcatgcccaaggcgctggccagtctggtgtcggaagagagctccatctcctacgggggctgcatggcccagctctatttcctcacgtgggctgcatcctcagagctgctgctcctcacggtcatggcctatgaccggtacgcagccatctgccacccgctgcattacagcagcatgatgagcaaggtgttctgcagcgggctggccacagccgtgtggctgctctgcgccgtcaacacggccatccacacggggctgatgctgcgcttggatttctgtggccccaatgtcattatccatttcttctgcgaggtccctcccctgctgcttctctcctgcagctccacctacgtcaacggtgtcatgattgtcctggcggatgctttctacggcatagtgaacttcctgatgaccatcgcgtcctatggcttcatcgtctccagcatcctgaaggtgaagactgcctgggggaggcagaaagccttctccacctgctcttcccacctcaccgtggtgtgcatgtattacaccgctgtcttctacgcctacataagcccggtctctggctacagcgcagggaagagcaagttggctggcctgctgtacactgtgctgagtcctaccctcaaccccctcatctatactttgagaaacaaggaggtcaaagcagccctcaggaagcttttccctttcttcagaaattaa

SEQ ID NO: 270 - protein, 328 aa, Homo sapiens
MKLWMESHLIVPETRPSPRMMSNQTLVTEFILQGFSEHPEYRVFLFSCFLFLYSGALTGNVLITLAITFNPGLHAPMYFFLLNLATMDIICTSSIMPKALASLVSEESSISYGGCMAQLYFLTWAASSELLLLTVMAYDRYAAICHPLHYSSMMSKVFCSGLATAVWLLCAVNTAIHTGLMLRLDFCGPNVIIHFFCEVPPLLLLSCSSTYVNGVMIVLADAFYGIVNFLMTIASYGFIVSSILKVKTAWGRQKAFSTCSSHLTVVCMYYTAVFYAYISPVSGYSAGKSKLAGLLYTVLSPTLNPLIYTLRNKEVKAALRKLFPFFRN

SEQ ID NO: 271 - DNA, 915 bp, Homo sapiens
  CDS (1)..(915)
atgttgatgaattactctagtgccactgaattttatctccttggcttccctggctctgaagaactacatcatatcctttttgctatattcttctttttctacttggtgacattaatgggaaacacagtcatcatcatgattgtctgtgtggataaacgtctgcagtcccccatgtatttcttcctcggccacctctctgccctggagatcctggtcacaaccataatcgtccccgtgatgctttggggattgctgctccctgggatgcagacaatatatttgtctgcctgtgttgtccagctcttcttgtaccttgctgtggggacaacagagttcgcattacttggagcaatggctgtggaccgttatgtggctgtctgtaaccctctgaggtacaacatcattatgaacagacacacctgcaactttgtggttcttgtgtcatgggtgtttgggtttctttttcaaatctggccggtctatgtcatgtttcagcttacttactgcaaatcaaatgtggtgaacaattttttttgtgaccgagggcaattgctcaaactatcctgcaataatactcttttcacggagtttatcctcttcttaatggctgtttttgttctctttggttctttgatccctacaattgtctccaacgcctacatcatctccaccattctcaagatcccgtcatcctctggccggaggaaatccttctccacttgtgcctcccacttcacctgtgttgtgattggctacggcagctgcttgtttctctacgtgaaacccaagcaaacgcaggcagctgattacaattgggtagtttccctgatggtttcagtagtaactcctttcctcaatcctttcatcttcaccctccggaatgataaagtcatagaggcccttcggatggggtga

SEQ ID NO: 272 - protein, 304 aa, Homo sapiens
MLMNYSSATEFYLLGFPGSEELHHILFAIFFFFYLVTLMGNTVIIMIVCVDKRLQSPMYFFLGHLSALEILVTTIIVPVMLWGLLLPGMQTIYLSACVVQLFLYLAVGTTEFALLGAMAVDRYVAVCNPLRYNIIMNRHTCNFVVLVSWVFGFLFQIWPVYVMFQLTYCKSNVVNNFFCDRGQLLKLSCNNTLFTEFILFLMAVFVLFGSLIPTIVSNAYIISTILKIPSSSGRRKSFSTCASHFTCVVIGYGSCLFLYVKPKQTQAADYNWVVSLMVSVVTPFLNPFIFTLRNDKVIEALRMG

SEQ ID NO: 273 - DNA, 792 bp, Homo sapiens
  CDS (1)..(792)
atgttggggaattactctagcgccactgaattttttctcttaggcttccctggctcccaagaagtatgccgtatcctatttgcgaccttcttcctcttgtatgcagtgacagtgatgggaaacgtggtcatcatcatcactgtctgtgttgataaatgtctgcagtcccccatttattttttcctgggccacctctgtgtcctggagatcctgatcacatccaccgctgtcccttttatgctctgggggttgctgcttccaagcacccagatcatgtctttgacagcctgtgctgcacagctatatttatacctttctttgggtaccttggagttggcattaatgggagtgatggctgtggaccgttatgtggctgtgtgtaaccctttgaggtacaacatcattatgaacagcagcaccttcatttgggtgataattgtgtcatgggttttggggtttctttctgaaatctggccagtttatgccacttttcagcttactttctgcaaatcaagtgtgttagatcatttttattgtgaccgaggacaattgctcaaggtatcctgtgaggacactcttttcagagagtttattctttttctaatggctgttttcattatcattggttctttgatccctacgattgtctcctacacctacatcatctccaccaacctcaagattccgtcagcctctggctggaggaaatccttttccacctgtgcctcccacttcacctatgttgtgattggctatggcagctgcttgtttctctacgtgaaacccaagtaa

SEQ ID NO: 274 - protein, 263 aa, Homo sapiens [sequence omitted]

SEQ ID NO: 275 - DNA, 1023 bp, Homo sapiens
  CDS (1)..(1023)
atggactccactttcacaggctataacctttataacctgcaagtaaaaactgaaatggacaagttgtcatcaggtttggatatatacaggaatccactgaagaacaagactgaagtcaccatgtttatattgacaggcttcacagatgattttgagctgcaagtcttcctatttttactattttttgcaatctatctctttaccttgataggcaatttagggctggttgtgttggtcattgaggattcctggctccacaaccccatgtattattttcttagtgttttatcattcttggatgcttgctattctacagttgtcactccaaaaatgttggtcaatttcctggcaaaaaataaatccatttcatttatcggatgtgcaacacagatgcttctttttgttacttttggaactacagaatgttttctcttggctgcaatggcttatgatcactatgtagccatctacaaccctctcctgtattcagtgagcatgtcacccagagtctatgtgccactcatcactgcttcctacgttgctggcattttacatgctactatacatatagtggctacatttagcctgtccttctgtggatccaatgaaattaggcatgtcttttgtgatatgcctcctctccttgctatttcttgttctgacactcacacaaaccagcttctactcttctactttgtgggttctattgagatagtcactatcctgattgtcctcatttcctgtgatttcattctgttgtccattctgaagatgcattctgctaagggaaggcaaaaggccttctctacatgtggctctcacctaactggagtgacaatttatcatggaacaattctcgtcagttatatgagaccaagttccagctatgcttcagaccatgacatcatagtgtcaatattttacacaattgtgattcccaagttgaatcccatcatctatagtttgaggaacaaagaagtaaaaaaggcagtgaagaaaatgttgaaattggtttacaaatga

SEQ ID NO: 276 - protein, 340 aa, Homo sapiens
MDSTFTGYNLYNLQVKTEMDKLSSGLDIYRNPLKNKTEVTMFILTGFTDDFELQVFLFLLFFAIYLFTLIGNLGLVVLVIEDSWLHNPMYYFLSVLSFLDACYSTVVTPKMLVNFLAKNKSISFIGCATQMLLFVTFGTTECFLLAAMAYDHYVAIYNPLLYSVSMSPRVYVPLITASYVAGILHATIHIVATFSLSFCGSNEIRHVFCDMPPLLAISCSDTHTNQLLLFYFVGSIEIVTILIVLISCDFILLSILKMHSAKGRQKAFSTCGSHLTGVTIYHGTILVSYMRPSSSYASDHDIIVSIFYTIVIPKLNPIIYSLRNKEVKKAVKKMLKLVYK

SEQ ID NO: 277 - DNA, 939 bp, Homo sapiens
  CDS (1)..(939)
atggaacaacacaatctaacaacggtgaatgaattcattcttacgggaatcacagatatcgctgagctgcaggcaccattatttgcattgttcctcatgatctatgtgatctcagtgatgggcaatttgggcatgattgtcctcaccaagttggactccaggttgcaaacccctatgtacttttttctcagacatctggctttcatggatcttggttattcaacaactgtgggacccaaaatgttagtaaattttgttgtggataagaatataatttcttattatttttgtgcaacacagctagctttctttcttgtgttcattggtagtgaactttttattctctcagccatgtcctacgacctctatgtggccatctgtaaccctctgctatacacagtaatcatgtcacgaagggtatgtcaggtgctggtagcaatcccttacctctattgcacattcatttctcttctagtcaccataaagatttttactttatccttctgtggctacaacgtcattagtcatttctactgtgacagtctccctttgttacctttgctttgttcaaatacacatgaaattgaattgataattctgatctttgcagctattgatttgatttcatctcttctgatagttcttttatcttacctgctcatccttgtagccattctcaggatgaattctgctggcagacaaaaggctttttctacctgtggagcccacctgacagtggtcatagtgttctatgggactttgcttttcatgtacgtgcagcccaagtccagtcattcctttgacactgataaagtggcttccatattttacaccctggttatccccatgttgaatcccttgatctatagtttacgaaacaaagatgtaaaatatgccctacgaaggacatggaataacttatgtaatatttttgtttaa

SEQ ID NO: 278 - protein, 312 aa, Homo sapiens
MEQHNLTTVNEFILTGITDIAELQAPLFALFLMIYVISVMGNLGMIVLTKLDSRLQTPMYFFLRHLAFMDLGYSTTVGPKMLVNFVVDKNIISYYFCATQLAFFLVFIGSELFILSAMSYDLYVAICNPLLYTVIMSRRVCQVLVAIPYLYCTFISLLVTIKIFTLSFCGYNVISHFYCDSLPLLPLLCSNTHEIELIILIFAAIDLISSLLIVLLSYLLILVAILRMNSAGRQKAFSTCGAHLTVVIVFYGTLLFMYVQPKSSHSFDTDKVASIFYTLVIPMLNPLIYSLRNKDVKYALRRTWNNLCNIFV

SEQ ID NO: 279 - DNA, 864 bp, Homo sapiens
  CDS (1)..(864)
atggccctctttatactatttctcctgatatacctaattactatgctgggcaatgtggggatgatattgataatccgcctggacctccagcttcacactcccatgtattttttccttactcacttgtcatttattgacctcagttactcaactgtcatcacacctaaaaccttagcgaacttactgacttccaactatatttccttcatgggctgctttgcccagatgttcttttttgtcttcttgggagctgctgaatgttttcttctctcatcaatggcctatgatcgctacgtagctatctgcagtcctctacgttacccagttattatgtccaaaaggctgtgttgcgctcttgtcactgggccctatgtgattagctttatcaactcctttgtcaatgtggtttggatgagcagactgcatttctgcgactcaaatgtagttcgtcactttttctgcgacacgtctccaattttagctctgtcctgcatggacacatacgacattgaaatcatgatacacattttagctggttccaccctgatggtgtcccttatcacaatatctgcatcctatgtgtccattctctctaccatcctgaaaattaattccacttcaggaaagcagaaagctttgtctacttgtgcctctcatctcttgggagtcaccatcttttatggaactatgatttttacttatttaaaaccaagaaagtcttattctttgggaagggatcaagtggcttctgttttttatactattgtgattcccatgctgaatccactcatttatagtcttagaaacaaagaagttaaaaatgctctcattagagtcatgcagagaagacaggactccaggtaa

SEQ ID NO: 280 - protein, 287 aa, Homo sapiens [sequence omitted]

SEQ ID NO: 281 - DNA, 960 bp, Homo sapiens
  CDS (1)..(960)
atgaatcatgtggtaaaacacaatcacacggcagtgaccaaggtgactgaatttattctcatggggattacagacaaccctgggctgcaggctccactgtttggactcttcctcatcatatatctggtcacagtgataggcaatctgggcatggttatcttgacctacttggactccaagctacacacccccatgtactttttccttagacatttgtcaatcactgatcttggttactccactgtcattgccccgaagatgttagtaaacttcatagtgcacaaaaacacaatttcttacaattggtatgccactcagctagcattctttgagattttcatcatctctgagctctttattctatcagcaatggcctatgatcgctacgtagccatctgtaaacctcttctgtacgtgatcatcatggcagagaaagtactttgggtgctggtaattgttccctatctctatagcacgtttgtgtcactatttctcacaattaagttatttaaactgtccttctgtggctcaaacataatcagctatttttactgtgactgtatccctctgatgtccatactctgttctgacacaaatgaattagaattaataattttgatcttctcaggctgtaatttgctcttctccctctcaattgttctcatatcctacatgtttattctagtggccattctcagaatgaactcaaggaaagggaggtacaaagccttctccacctgtagctctcatctgacagtggtgatcatgttctatgggacattgttatttatttacttgcaacccaagtccagtcatactttggctattgataaaatggcctcagtgttttataccctgttgattcctatgctgaatccgttgatctacagcctaaggaacaaagaagtaaaagatgctctaaagagaactttaaccaatcgattcaaaattcccatttaa

SEQ ID NO: 282 - protein, 319 aa, Homo sapiens
MNHVVKHNHTAVTKVTEFILMGITDNPGLQAPLFGLFLIIYLVTVIGNLGMVILTYLDSKLHTPMYFFLRHLSITDLGYSTVIAPKMLVNFIVHKNTISYNWYATQLAFFEIFIISELFILSAMAYDRYVAICKPLLYVIIMAEKVLWVLVIVPYLYSTFVSLFLTIKLFKLSFCGSNIISYFYCDCIPLMSILCSDTNELELIILIFSGCNLLFSLSIVLISYMFILVAILRMNSRKGRYKAFSTCSSHLTVVIMFYGTLLFIYLQPKSSHTLAIDKMASVFYTLLIPMLNPLIYSLRNKEVKDALKRTLTNRFKIPI

SEQ ID NO: 283 - DNA, 951 bp, Homo sapiens
  CDS (1)..(951)
atggctcctgaaaatttcaccagagtcactgagtttattcttacaggtgtctctagctgtccagagctccagattcccctcttcctggtctttctggtgctctatgggctgaccatggcagggaacctgggcatcatcaccctcaccagtgttgactctcgacttcaaacccccatgtactttttcctgcaacatctggctctcattaatcttggtaactctactgtcattgcccctaaaatgctgattaactttttagtaaagaagaaaactacctcattctatgaatgtgccacccaactgggagggttcttgttctttattgtatcggaggtaatcatgctggctttgatggcctatgaccgctatgtggctatttgtaaccctctgctgtacatggtggtggtgtctcggcggctctgcctcctgctggtctccctcacatacctctatggcttttctacagctattgtggtttcatcttatgtattctctgtgtcttattgctcttctaatataatcaatcatttttactgtgataatgttcctctgttagcattatcttgctctgatacttacttaccagaaacagttgtctttatatctgcagcaacaaatgtggttggttccttgattatagttctagtatcttatttcaatattgttttgtctattttaaaaatatgttcatcagaaggaaggaaaaaagccttttctacctgtgcttcacatatgatggcagtcacaattttttatgggacattgctattcatgtatgtgcagccccgaagtaaccattcactggatactgatgataagatggcttctgtgttttacacgttggtaattcctatgctgaatcccttgatctacagcctgaggaataaggatgtgaagactgctctacagagattcatgacaaatctgtgctattcctttaaaacaatgtaa

SEQ ID NO: 284 - protein, 316 aa, Homo sapiens
MAPENFTRVTEFILTGVSSCPELQIPLFLVFLVLYGLTMAGNLGIITLTSVDSRLQTPMYFFLQHLALINLGNSTVIAPKMLINFLVKKKTTSFYECATQLGGFLFFIVSEVIMLALMAYDRYVAICNPLLYMVVVSRRLCLLLVSLTYLYGFSTAIVVSSYVFSVSYCSSNIINHFYCDNVPLLALSCSDTYLPETVVFISAATNVVGSLIIVLVSYFNIVLSILKICSSEGRKKAFSTCASHMMAVTIFYGTLLFMYVQPRSNHSLDTDDKMASVFYTLVIPMLNPLIYSLRNKDVKTALQRFMTNLCYSFKTM

SEQ ID NO: 285 - DNA, 930 bp, Homo sapiens
  CDS (1)..(930)
atggcaaatctcacaatcgtgactgaatttatccttatggggttttctaccaataaaaatatgtgcattttgcattcgattctcttcttgttgatttatttgtgtgccctgatggggaatgtcctcattatcatgatcacaactttggaccatcatctccacacccccgtgtatttcttcttgaagaatctatctttcttggatctctgccttatttcagtcacggctcccaaatctatcgccaattctttgatacacaacaactccatttcattccttggctgtgtttcccaggtctttttgttgctttcttcagcatctgcagagctgctcctcctcacggtgatgtcctttgaccgctatactgctatatgtcaccctctgcactatgatgtcatcatggacaggagcacctgtgtccaaagagccactgtgtcttggctgtatgggggtctgattgctgtgatgcacacagctggcaccttctccttatcctactgtgggtccaacatggtccatcagttcttctgtgacattccccagttattagctatttcttgctcagaaaatttaataagagaaattgcactcatccttattaatgtagttttggatttctgctgttttattgtcatcatcattacctatgtccacgtcttctctacagtcaagaagatcccttccacagaaggccagtcaaaagcctactctatttgccttccacacttgctggttgtgttatttctttccactggattcattgcttatctgaagccagcttcagagtctccttctattttggatgctgtaatttctgtgttctacactatgctgcccccaacctttaatcccattatatacagtttgagaaacaaggccataaaggtggctctggggatgttgataaagggaaagctcaccaaaaagtaa

SEQ ID NO: 286 - protein, 309 aa, Homo sapiens
MANLTIVTEFILMGFSTNKNMCILHSILFLLIYLCALMGNVLIIMITTLDHHLHTPVYFFLKNLSFLDLCLISVTAPKSIANSLIHNNSISFLGCVSQVFLLLSSASAELLLLTVMSFDRYTAICHPLHYDVIMDRSTCVQRATVSWLYGGLIAVMHTAGTFSLSYCGSNMVHQFFCDIPQLLAISCSENLIREIALILINVVLDFCCFIVIIITYVHVFSTVKKIPSTEGQSKAYSICLPHLLVVLFLSTGFIAYLKPASESPSILDAVISVFYTMLPPTFNPIIYSLRNKAIKVALGMLIKGKLTKK

SEQ ID NO: 287 - DNA, 1143 bp, Homo sapiens
  CDS (1)..(1143)
atgaagacagaatatcatgaacacaagatgtcattggaaagcattcaagcaagcaagtttggatgctacttacctgcgcacgcatgcacacacacacacacacacacacacacacactgtctctctctcatgaataagagacttaacactgctggcttttacaatttaataacttatttttctagatttgttgggaatatggaaaaaagaaatctaacagttgtcagggaattcgtccttctgggacttcctagctcagcagagcagcagcacctcctgtctgtgctctttctctgtatgtatttagccaccaccttggggaacatgctcatcattgcgacgattggctttgactctcacctccattcccctatgtacttcttccttagtaacttggcctttgttgacatctgctttacgtcgactacagtcccccaaatggtagtgaatatcttgactggcaccaagactatctcttttgcaggctgcctcacccagctcttcttcttcgtttcttttgtgaatatggacagcctccttctgtgtgtgatggcgtatgatagatatgtggcgatttgccaccccttacattacaccgccagaatgaacctgtgcctttgtgtccagctagtggctggactgtggcttgttacttacctccacgccctcctgcatactgtcctaatagcacagctgtccttctgtgcctccaatatcatccatcatttcttctgtgatctcaatcctctcctgcagctctcttgctctgacgtctccttcaatgtaatgatcatttttgcagtaggaggtctattggctctcacgccccttgtctgtatcctcgtatcttatggacttatcttctccactgttctgaagatcacctctactcagggcaagcagagagctgtttccacctgcagctgccacctgtcagtggtggtgttgttttacggcacagccatcgccgtctatttcagcccttcatccccccatatgcctgagagcgacactctgtcaaccatcatgtattcaatggtggctccgatgctgaatcctttcatctataccctaaggaacagggatatgaagaggggacttcagaaaatgcttctcaagtgcacagtctttcagcagcaataa

SEQ ID NO: 288 - protein, 380 aa, Homo sapiens
MKTEYHEHKMSLESIQASKFGCYLPAHACTHTHTHTHTHCLSLMNKRLNTAGFYNLITYFSRFVGNMEKRNLTVVREFVLLGLPSSAEQQHLLSVLFLCMYLATTLGNMLIIATIGFDSHLHSPMYFFLSNLAFVDICFTSTTVPQMVVNILTGTKTISFAGCLTQLFFFVSFVNMDSLLLCVMAYDRYVAICHPLHYTARMNLCLCVQLVAGLWLVTYLHALLHTVLIAQLSFCASNIIHHFFCDLNPLLQLSCSDVSFNVMIIFAVGGLLALTPLVCILVSYGLIFSTVLKITSTQGKQRAVSTCSCHLSVVVLFYGTAIAVYFSPSSPHMPESDTLSTIMYSMVAPMLNPFIYTLRNRDMKRGLQKMLLKCTVFQQQ

SEQ ID NO: 289 - DNA, 765 bp, Homo sapiens
  CDS (1)..(765)
atgtattttttcttctccaacctaagctttttggatctgtgttacacaaccggcattgttccacagctcctggttaatctcaggggagcagacaaatcaatctcctatggtggttgtgtagttcagctgtacatctctctaggcttgggatctacagaatgcgttctcttaggagtgatggcatttgaccgctatgcagctgtttgcaggcccctccactacacagtagtcatgcacccttgtctgtatgtgctgatggcttctacttcatgggtcattggttttgccaactccctattgcagacggtgctcatcttgcttttaacactttgtggaagaaataaattagaacactttctttgtgaggttcctccattgctcaagcttgcctgtgttgacactactatgaatgaatctgaactcttctttgtcagtgtcattattcttcttgtacctgttgcattaatcatattctcctatagtcagattgtcagggcagtcgtgaggataaagtcagcaacagggcagagaaaagtgtttgggacatgtggctcccacctcacagtggtttccctgttctacggcacagctatctatgcttacctccagcccggcaacaactactctcaggatcagggcaagttcatctctctcttctacaccatcattacacccatgatcaaccccctcatatatacactgaggaacaaggatgtgaaaggagcacttaagaaggtgctctggaagaactacgactccagatga

SEQ ID NO: 290 - protein, 254 aa, Homo sapiens
MYFFFSNLSFLDLCYTTGIVPQLLVNLRGADKSISYGGCVVQLYISLGLGSTECVLLGVMAFDRYAAVCRPLHYTVVMHPCLYVLMASTSWVIGFANSLLQTVLILLLTLCGRNKLEHFLCEVPPLLKLACVDTTMNESELFFVSVIILLVPVALIIFSYSQIVRAVVRIKSATGQRKVFGTCGSHLTVVSLFYGTAIYAYLQPGNNYSQDQGKFISLFYTIITPMINPLIYTLRNKDVKGALKKVLWKNYDSR

SEQ ID NO: 291 - DNA, 954 bp, Homo sapiens
  CDS (1)..(954)
atgcaaccatataccaaaaactggacccaggtaactgaatttgtcatgatgggctttgctggcatccatgaagcacacctcctcttcttcatactcttcctcaccatgtacctgttcaccttggtggagaatttggccatcattttagtggtgggtttggaccaccgactacggagacccatgtatttcttcctgacacacttgtcctgccttgaaatctggtacacttctgttacagtgcccaagatgctggctggttttattggggtggatggtggcaagaatatctcttatgctggttgcctatcccagctcttcatcttcacctttcttggggcaactgagtgtttcctactggctgccatggcctatgatcgttatgtggccatttgtatgcctctccactatggggcttttgtgtcctggggcacctgcatccgtctggcagctgcctgttggctggtaggtttcctcacacccatcttgccaatctacctcttgtctcagctaacattttgtggcccaaatgtcattgaccatttctcctgtgatgcctcacccttgctagccttgtcgtgctcagatgtcacttggaaggagactgtggatttcctggtgtctctggctgtgctactggcctcctctatggtcattgctgtgtcctatggcaacatcgtctggacactgctgcacatccgctcagctgctgagcgctggaaggccttctctacctgtgcagctcacctgactgtggtgagcctcttctatggcactcttttctttatgtatgtccagaccaaggtgacctcctccatcaacttcaacaaggtggtatctgtcttctactctgttgtcacgcccatgctcaatcctctcatctacagtcttaggaacaaggaagtgaagggagctctgggtcgagtcttttctctcaacttttggaagggacagtga

SEQ ID NO: 292 - protein, 317 aa, Homo sapiens
MQPYTKNWTQVTEFVMMGFAGIHEAHLLFFILFLTMYLFTLVENLAIILVVGLDHRLRRPMYFFLTHLSCLEIWYTSVTVPKMLAGFIGVDGGKNISYAGCLSQLFIFTFLGATECFLLAAMAYDRYVAICMPLHYGAFVSWGTCIRLAAACWLVGFLTPILPIYLLSQLTFCGPNVIDHFSCDASPLLALSCSDVTWKETVDFLVSLAVLLASSMVIAVSYGNIVWTLLHIRSAAERWKAFSTCAAHLTVVSLFYGTLFFMYVQTKVTSSINFNKVVSVFYSVVTPMLNPLIYSLRNKEVKGALGRVFSLNFWKGQ

SEQ ID NO: 293 - DNA, 945 bp, Homo sapiens
  CDS (1)..(945)
atggccaagaataatctcaccagagtaaccgaattcattctcatgggctttatggaccaccccaaattggagattcccctctttctggtgtttctgagtttctacctagtcacccttcttgggaatgtggggatgattatgttaatccaagtagatgtcaaactctacaccccaatgtacttcttcctgagccacctctccctgctggatgcctgttacacctcagtcatcacccctcagatcctagccacattggccacaggcaaaacggtcatctcctacggccactgtgctgcccagttctttttattcaccatctgtgcaggcacagagtgctttctgctggcagtgatggcctatgatcgctatgctgccattcgcaacccactgctctataccgtggccatgaatcccaggctctgctggagcctggtggtaggagcctatgtctgtggggtgtcaggagccatcctgcgtaccacttgcaccttcaccctctccttctgtaaggacaatcaaataaacttcttcttctgtgacctcccacccctgctgaagcttgcctgcagtgacacagcaaacatcgagattgtcatcatcttctttggcaattttgtgattttggccaatgcctccgtcatcctgatttcctatctgctcatcatcaagaccattttgaaagtgaagtcttcaggtggcagggccaagactttctccacatgtgcctctcacatcactgctgtggcccttttctttggagcccttatcttcatgtatctgcaaagtggctcaggcaaatctctggaggaagacaaagtcgtgtctgtcttctatacagtggtcatccccatgctgaaccctctgatctacagcttaagaaacaaagatgtaaaagacgccttcagaaaggtcgctaggagactccaggtgtccctgagcatgtag

SEQ ID NO: 294 - protein, 314 aa, Homo sapiens
MAKNNLTRVTEFILMGFMDHPKLEIPLFLVFLSFYLVTLLGNVGMIMLIQVDVKLYTPMYFFLSHLSLLDACYTSVITPQILATLATGKTVISYGHCAAQFFLFTICAGTECFLLAVMAYDRYAAIRNPLLYTVAMNPRLCWSLVVGAYVCGVSGAILRTTCTFTLSFCKDNQINFFFCDLPPLLKLACSDTANIEIVIIFFGNFVILANASVILISYLLIIKTILKVKSSGGRAKTFSTCASHITAVALFFGALIFMYLQSGSGKSLEEDKVVSVFYTVVIPMLNPLIYSLRNKDVKDAFRKVARRLQVSLSM

SEQ ID NO: 295 - DNA, 702 bp, Homo sapiens
  CDS (1)..(702)
atggccaaaagaaatctcagcactgtgacagagttcattcttgtagtcttcacagatcaccctgaactggcagttccactcttcctagtgtttctcagtttctatcttgtcacttttctggggaatggggggatgatcattctaatccaagtggatgcccaactccacacccccgtgtacttcttcctgagccaccttgctttcctggatgcctgctgtgcctcagtaatcacccctcagattctggccacactggccacagacaagacagttatctcctatggctgccgtgctgtgcagttctctttcttcaccatatgtgcaggcacagagtgttacctgctgtcagtgatggcctatgaccgctttgttgccattagcaatccactgcactgtaacatgaccatgactccaggtacctgcagggtctttttggccagtgccttcatctgtggggtgtcaggggccattctgcataccacgtgcaccttcaccctctccttctgttgtgacaatcagatcaacttcttcttctgtgacctcccacccctgctgaagctcgcctgcagcagcatgacacaaactgagattgtcattctcctttgtgcaaaatgcatgttcctagccaatgtcatggttatcctgatctgctacatgctcattatcagagccattttgagggtgaagtcggcaggtgggtaa

SEQ ID NO: 296 - protein, 233 aa, Homo sapiens
MAKRNLSTVTEFILVVFTDHPELAVPLFLVFLSFYLVTFLGNGGMIILIQVDAQLHTPVYFFLSHLAFLDACCASVITPQILATLATDKTVISYGCRAVQFSFFTICAGTECYLLSVMAYDRFVAISNPLHCNMTMTPGTCRVFLASAFICGVSGAILHTTCTFTLSFCCDNQINFFFCDLPPLLKLACSSMTQTEIVILLCAKCMFLANVMVILICYMLIIRAILRVKSAGG

SEQ ID NO: 297 - DNA, 1014 bp, Homo sapiens
  CDS (1)..(1014)
  modified_base (903)..(1002): a, t, c, g, other or unknown
atggaaggaataaataaaactgcaaagatgcagtttttctttcgtccattctcacctgaccctgaggtccagatgctgatttttgtggtcttcctgatgatgtatctgaccagcctcggtggaaatgctacaattgcagtcattgttcagatcaatcattccctccacacccccatgtactttttcctggctaatctggcagttctagaaatcttctatacatcttccatcaccccattggccttggcaaacctcctttcaatgggcaaaactcctgtttccatcacgggatgtggcacccagatgtttttctttgtcttcttgggtggggctgattgtgtcctgctggtagtcatggcttatgaccagtttatagcgatctgtcaccctctgcgatacaggctcatcatgagctggtccttgtgtgtggagctgctggtaggctccttggtgctggggttcctgttgtcactgccactcaccattttaatcttccatctcccattctgccacaatgatgagatctaccacttctactgtgacatgcctgcagtcatgcgcctggcttgtgcagacacacgcgttcacaagactgctctgtatatcatcagcttcatcgtccttagcatccccctctcattgatctccatctcctatgtcttcatcgtggtagccattttacggatccggtcagcagaagggcgccagcaagcctactctacctgctcttctcacatcttagtggtcctcctgcagtatggctgcaccagctttatatacttgtcccccagttccagctactctcctgagatgggccgggtggtatctgtggcctacacatttatcactcccattttaaaccccttgatctatagtttgaggaacaaggaactgaaagatgcnnnnnnnnnnnnnnnnnnnnnnnnnnnnnnnnnnnnnnnnnnnnnnnnnnnnnnnnnnnnnnnnnnnnnnnnnnnnnnnnnnnnnnnnnnnnnnnnnnnncagcctgagtga

SEQ ID NO: 298 - protein, 337 aa, Homo sapiens
  MOD_RES (303)..(334): Variable amino acid
MEGINKTAKMQFFFRPFSPDPEVQMLIFVVFLMMYLTSLGGNATIAVIVQINHSLHTPMYFFLANLAVLEIFYTSSITPLALANLLSMGKTPVSITGCGTQMFFFVFLGGADCVLLVVMAYDQFIAICHPLRYRLIMSWSLCVELLVGSLVLGFLLSLPLTILIFHLPFCHNDEIYHFYCDMPAVMRLACADTRVHKTALYIISFIVLSIPLSLISISYVFIVVAILRIRSAEGRQQAYSTCSSHILVVLLQYGCTSFIYLSPSSSYSPEMGRVVSVAYTFITPILNPLIYSLRNKELKDAXXXXXXXXXXXXXXXXXXXXXXXXXXXXXXXXXQPE

SEQ ID NO: 299 - DNA, 813 bp, Homo sapiens
  CDS (1)..(813)
atgaccattgtcttgctttcagctctggattcccggctgcacacaccaatgtatttctttttggcaaacctctcattcctggacatgtgtttcaccacaggttccatccctcagatgctctacaacctttggggtccagataagaccatcagctatgtgggttgtgccatccagctgtactttgtcctggccctgggaggggtggagtgtgtcctcctggctgtcatggcatatgaccgctatgctgcagtctgcaaacccctgcactacaccatcatcatgcacccacgtctctgtggacagctggcttcagtggcatggctgagtggctttggcaattctctcataatggcaccccagacattgatgctaccccgctgtgggcacagacgagttgaccactttctctgtgagatgccagcactaattggtatggcctgtgtagacaccatgatgcttgaggcactggcttttgccctggcaatctttatcatcctggcaccactcatcctcattctcatttcttatggttacgttggaggaacagtgcttaggatcaagtcagctgctgggcgaaagaaagccttcaacacttgcagctcgcatctaattgttgtctctctcttctatggtacaatcatatacatgtacctccagccagcaaatacttattcccaggaccagggcaagtttcttacccttttctacacaattgtcactcccagtgttaaccccctgatctatacactaagaaacaaagatgttaaagaggccatgaagaaggtgctagggaaggggagtgcagaaatatag

SEQ ID NO: 300 - protein, 270 aa, Homo sapiens [sequence omitted]

SEQ ID NO: 301 - DNA, 942 bp, Homo sapiens
  CDS (1)..(942)
atgaattgggtaaatgacagcatcatacaggagtttattctgctgggtttctcagatcgaccttggctggagtttccactccttgtggtcttcttgatttcttacactgtgaccatctttggcaatctgaccattattctagtgtcacgcctggacaccaaacttcatacccccatgtatttttttcttaccaatctatcactcctggatctttgttacaccacatgtacagtcccacaaatgctagtaaatttatgcagcatcaggaaagtaatcagttatcgtggctgtgtagcccagcttttcatatttctggccttgggggctactgaatatcttctcctggccgtcatgtcctttgataggtttgtagctatttgtcggcctctccattactcagttatcatgcaccagagactctgcctccagttggcagctgcatcctgggttactggttttagtaactcagtgtggttgtctaccctgactctccagctgccactctgtgacccctatgtgatagatcactttctctgtgaagtccctgcactgctcaagttatcttgtgttgagacaacagcaaatgaggctgaactattccttgtcagtgagctcttccatctaatacccctgacactcatccttatatcatatgcttttattgtccgagcagtattgaggatacagtctgctgaaggtcgacaaaaagcatttgggacatgtggttcccatctaattgtggtgtctcttttttatagtacagccgtctctgtgtacctgcaaccaccttcgcccagctccaaggaccaaggaaagatggtttctctcttctatggaatcattgcacccatgctgaatccccttatatatacacttaggaacaaggaggtaaaggaaggctttaaaaggttggttgcaagagtcttcttaatcaagaaataa

SEQ ID NO: 302 - protein, 313 aa, Homo sapiens
MNWVNDSIIQEFILLGFSDRPWLEFPLLVVFLISYTVTIFGNLTIILVSRLDTKLHTPMYFFLTNLSLLDLCYTTCTVPQMLVNLCSIRKVISYRGCVAQLFIFLALGATEYLLLAVMSFDRFVAICRPLHYSVIMHQRLCLQLAAASWVTGFSNSVWLSTLTLQLPLCDPYVIDHFLCEVPALLKLSCVETTANEAELFLVSELFHLIPLTLILISYAFIVRAVLRIQSAEGRQKAFGTCGSHLIVVSLFYSTAVSVYLQPPSPSSKDQGKMVSLFYGIIAPMLNPLIYTLRNKEVKEGFKRLVARVFLIKK

SEQ ID NO: 303 - DNA, 813 bp, Homo sapiens
  CDS (1)..(813)
atggggaatcttggtctaattgttctcatctggaaagaccctcaccttcatatcccaatgtatttattccgtgggagtttggcctttgtggatgcttggttatcatccacagtgactccaaagatgctgatcaacttcttagctaagagtaagatgatatctctctctgaatgcatggtacaatttttttcctttgtaatcagtgtaaccacagaatgttttatctcggcatcaatggcatatgatcgctatgtagccatttgcaaagctttactttatccagtcattatgaccaacggactatgcatccagctattagtcttgtcatttataggtggccttcttcatgctttaatccatgaaatttttttattcagattaaccttctgtaattccaacataatacaacacttttactgtgacattatcccattgttaaagatttcctgtactgattcttttattaactttctaatggtttttattttcgcagattcaattcaagtttttaccattggaactattcttatatcttatacacttgtcctccttataatcttaaaaaataagtctgtcaaagggatacaaaaagctgtctccacctgtggagctcatctcttatctgtatctttatactatgggccccttgtcttcatgtatgtgggctctgcatccccgcaagcagatgaccaagatatgatggagtctctattttacactgtcatcgttcctttattaaattccatgatctacagcctgagaaacaagcaagtaatagcttcattcacaaaaatgttcaaaagaaatgtttag

SEQ ID NO: 304 - protein, 270 aa, Homo sapiens
MGNLGLIVLIWKDPHLHIPMYLFRGSLAFVDAWLSSTVTPKMLINFLAKSKMISLSECMVQFFSFVISVTTECFISASMAYDRYVAICKALLYPVIMTNGLCIQLLVLSFIGGLLHALIHEIFLFRLTFCNSNIIQHFYCDIIPLLKISCTDSFINFLMVFIFADSIQVFTIGTILISYTLVLLIILKNKSVKGIQKAVSTCGAHLLSVSLYYGPLVFMYVGSASPQADDQDMMESLFYTVIVPLLNSMIYSLRNKQVIASFTKMFKRNV

SEQ ID NO: 305 - DNA, 945 bp, Homo sapiens
  CDS (1)..(945)
atgtcgaatgaggacatggaacaggataatacaacattgctgacagagtttgttctcacaggacttacatatcagccagagtggaaaatgcccctgttcttggtgttcttggtgatctatctcatcactattgtgtggaaccttggtctgattgctcttatctggaatgacccacaacttcacatccccatgtacttttttcttgggagtttagcctttgttgatgcttggatatcttccacagtaactcccaaaatgttggttaatttcttggccaaaaacaggatgatatctctgtctgaatgcatgattcaatttttttcctttgcatttggtggaactacagaatgttttctcttggcaacaatggcatatgatcgctatgtagccatatgcaaacctttactatatccagtgattatgaacaattcactatgcatacggctgttagccttctcatttttaggtggcttcctccatgccttaattcatgaagtccttatattcagattaaccttctgcaattctaacataatacatcatttttactgtgatattataccactgtttatgatttcctgtactgacccttctattaattttctaatggtttttattttgtctggctcaattcaggtattcaccattgtgacagttcttaattcttacacatttgctcttttcacaatcctaaaaaagaagtctgttagaggcgtaaggaaagccttttccacctgtggagcccatctcttatctgtctctttatattatggcccacttatcttcatgtatttgcgccctgcatctccacaagcagatgaccaagatatgatagactctgtcttttatacaatcataattcctttgctaaatcccattatctacagtctgagaaataaacaagtaatagattcattcacaaaaatggtaaaaagaaatgtttag

SEQ ID NO: 306 - protein, 314 aa, Homo sapiens
MSNEDMEQDNTTLLTEFVLTGLTYQPEWKMPLFLVFLVIYLITIVWNLGLIALIWNDPQLHIPMYFFLGSLAFVDAWISSTVTPKMLVNFLAKNRMISLSECMIQFFSFAFGGTTECFLLATMAYDRYVAICKPLLYPVIMNNSLCIRLLAFSFLGGFLHALIHEVLIFRLTFCNSNIIHHFYCDIIPLFMISCTDPSINFLMVFILSGSIQVFTIVTVLNSYTFALFTILKKKSVRGVRKAFSTCGAHLLSVSLYYGPLIFMYLRPASPQADDQDMIDSVFYTIIIPLLNPIIYSLRNKQVIDSFTKMVKRNV

SEQ ID NO: 307 - DNA, 978 bp, Homo sapiens
  CDS (1)..(978)
atgttcctttacctttgcttcatttttcagaggacatgcagtgaggagatggaagaggaaaatgcaacattgctgacagagtttgttctcacaggatttttacatcaacctgactgtaaaataccgctcttcctggcattcttggtaatatatctcatcaccatcatggggaatcttggtctaattgttctcatctggaaagaccctcaccttcatatcccaatgtacttattccttgggagtttagcctttgtggatgcttcgttatcatccacagtgactccgaagatgctgatcaacttcttagctaagagtaagatgatatctctctctgaatgcatggtacaatttttttcccttgtaaccactgtaaccacagaatgttttctcttggcaacaatggcatatgatcgctatgtagccatttgcaaagctttactttatccagtcattatgaccaatgaactatgcattcagctattagtcttgtcatttataggtggccttcttcatgctttaatccatgaagctttttcattcagattaaccttctgtaattccaacataatacaacacttttactgtgacattatcccattgttaaagatttcctgtactgattcctctattaactttctaatggtttttattttcgcaggttctgttcaagtttttaccattggaactattcttatatcttatacaattatcctctttacaatcttagaaaagaagtctatcaaagggatacgaaaagctgtctccacctgtggggctcatctcttatctgtatctttatactatggccccctcaccttcaaatatctgggctctgcatctccgcaagcagatgaccaagatatgatggagtctctattttacactgtcatagttcctttattaaatcccatgatctacagcctgagaaacaagcaagtaatagcttcattcacaaaaatgttcaaaagcaatgtttag

SEQ ID NO: 308 - protein, 325 aa, Homo sapiens
MFLYLCFIFQRTCSEEMEEENATLLTEFVLTGFLHQPDCKIPLFLAFLVIYLITIMGNLGLIVLIWKDPHLHIPMYLFLGSLAFVDASLSSTVTPKMLINFLAKSKMISLSECMVQFFSLVTTVTTECFLLATMAYDRYVAICKALLYPVIMTNELCIQLLVLSFIGGLLHALIHEAFSFRLTFCNSNIIQHFYCDIIPLLKISCTDSSINFLMVFIFAGSVQVFTIGTILISYTIILFTILEKKSIKGIRKAVSTCGAHLLSVSLYYGPLTFKYLGSASPQADDQDMMESLFYTVIVPLLNPMIYSLRNKQVIASFTKMFKSNV

SEQ ID NO: 309 - DNA, 975 bp, Homo sapiens
  CDS (1)..(975)
atgcccagtgaagtcctgggcagaagaatgatgtgggaaaactggacaattgtcagtgaatttgttctcgtgagcttctcagccctgtccactgagcttcaggctctactgtttctccttttcttgaccatttacttggttactttaatgggcaatgtcctcatcatcctggtcactatagctgactctgcactacaaagtcctatgtacttcttcctcagaaacttgtccttcctggagataggtttcaacttggtcattgtgcccaagatgctggggaccctgatcattcaagacacaaccatctccttccttggatgtgccactcagatgtatttcttcttcttttttggggctgctgagtgctgcctcctggccaccatggcatatgaccgctacgtggccatctgtgaccccttgcactacccagtcatcatgggccacatatcctgtgcccagctggcagctgcctcttggttctcagggttttcagtggccactgtgcaaaccacatggattttcagtttccctttttgtggccccaacagggtgaaccacttcttctgtgacagccctcctgttattgcactggtctgtgctgacacctctgtgtttgaactggaggctctgacagccactgtcccattcattctctttcctttcttgctgatcctgggatcctatgtccgcatcctctccactatcttcaggatgccgtcagctgaggggaaacatcaggcattctccacctgttccgcccacctcttggttgtctctctcttctatagcactgccatcctcacgtatttccgaccccaatccagtgcctcttctgagagcaagaagctgctgtcactctcttccacagtggtgactcccatgttgaaccccatcatctacagctcaaggaataaagaagtgaaggctgcactgaagcggcttatccacaggaccctgggctctcagaaactatga

SEQ ID NO: 310 - protein, 324 aa, Homo sapiens [sequence omitted]

SEQ ID NO: 311 - DNA, 843 bp, Homo sapiens
  CDS (1)..(843)
atggcaattaggaaccattccaccctccacaaacccatgtacttttttctagctaatatgtcctttctggagatctggtatgtcactgtcactattcccaagatgcttgctggctttgttggatccaaacaggatcatggacagctaatctcctttgagggatgcatgacacagctctactttttccttggcttgggctgcactgagtgtgtccttctcgctgttatggcctatgatcgctatatggccatctgctatcctctccactacccagtcattgtcagtggccggctgtgtgtgcagatggctgctggctcttgggctggaggttttggcatctccatggtcaaagtttttcttatttctggcctctcttactgtggccccaacatcatcaaccactttttctgtgatgtctctccattgctcaacctctcatgcactgatatgtccacagcagagcttacagatttcatcctggccatttttattcttctagggccactctctgtcactggggcctcctatgtggccattactggtgctgtgatgcacattccttcggctgctggacgctataaggccttttccacctgtgcctctcatctcactgttgtgataatcttctatgcagccagtatcttcatctatgctcggccaaaggcactctcagcttttgacaccaacaagttgtctctgtactgtatgctgtcattgtaccattgctcaatcccatcatttactgcctgcgcaatcaagaggtcaagagagccctatgctgtactctgcaccctgtaccagcaccaggatcctgaccccaagaaagctagcagaaatgtatag

SEQ ID NO: 312 - protein, 280 aa, Homo sapiens
MAIRNHSTLHKPMYFFLANMSFLEIWYVTVTIPKMLAGFVGSKQDHGQLISFEGCMTQLYFFLGLGCTECVLLAVMAYDRYMAICYPLHYPVIVSGRLCVQMAAGSWAGGFGISMVKVFLISGLSYCGPNIINHFFCDVSPLLNLSCTDMSTAELTDFILAIFILLGPLSVTGASYVAITGAVMHIPSAAGRYKAFSTCASHLTVVIIFYAASIFIYARPKALSAFDTNKLSLYCMLSLYHCSIPSFTACAIKRSREPYAVLCTLYQHQDPDPKKASRNV

SEQ ID NO: 313 - DNA, 972 bp, Homo sapiens
  CDS (1)..(972)
atgtggcagaagaatcagacctctctggcagacttcatccttgaggggctcttcgatgactcccttacccaccttttccttttctccttgaccatggtggtcttccttattgcggtgagtggcaacaccctcaccattctcctcatctgcattgatccccagcttcatacaccaatgtatttcctgctcagccagctctccctcatggatctgatgcatgtctccacaatcatcctgaagatggctaccaactacctatctggcaagaaatctatctcctttgtgggctgtgcaacccagcacttcctctatttgtgtctaggtggtgctgaatgttttctcttagctgtcatgtcctatgaccgctatgttgccatctgtcatccactgcgctatgctgtgctcatgaacaagaaggtgggactgatgatggctgtcatgtcatggttgggggcatccgtgaactccctaattcacatggcgatcttgatgcacttccctttctgtgggcctcggaaagtctaccacttctactgtgagttcccagctgttgtgaagttggtatgtggcgacatcactgtgtatgagaccacagtgtacatcagcagcattctcctcctcctccccatcttcctgatttctacatcctatgtcttcatccttcaaagtgtcattcagatgcgctcatctgggagcaagagaaatgcctttgccacttgtggctcccacctcacggtggtttctctttggtttggtgcctgcatcttctcctacatgagacccaggtcccagtgcactctattgcagaacaaagttggttctgtgttctacagcatcattacgcccacattgaattctctgatttatactctccggaataaagatgtagctaaggctctgagaagagtgctgaggagagatgttatcacccagtgcattcaacgactgcaattgtggttgccccgagtgtag

SEQ ID NO: 314 - protein, 323 aa, Homo sapiens
MWQKNQTSLADFILEGLFDDSLTHLFLFSLTMVVFLIAVSGNTLTILLICIDPQLHTPMYFLLSQLSLMDLMHVSTIILKMATNYLSGKKSISFVGCATQHFLYLCLGGAECFLLAVMSYDRYVAICHPLRYAVLMNKKVGLMMAVMSWLGASVNSLIHMAILMHFPFCGPRKVYHFYCEFPAVVKLVCGDITVYETTVYISSILLLLPIFLISTSYVFILQSVIQMRSSGSKRNAFATCGSHLTVVSLWFGACIFSYMRPRSQCTLLQNKVGSVFYSIITPTLNSLIYTLRNKDVAKALRRVLRRDVITQCIQRLQLWLPRV

SEQ ID NO: 315 - DNA, 990 bp, Homo sapiens
  CDS (1)..(990)
atgactttggtttcttttttctctttcctctccaagccattgataatgctccttagcaattcaagctggaggctatcccagccttcttttctcctggtagggattccaggtttagaggaaagccagcactggattgcactgcccctgggcatcctttacctccttgctttagtgggcaatgttaccattctcttcatcatctggatggacccatccttgcaccaatctatgtacctcttcctgtccatgctagctgccatcgacctggttctggcctcctccactgcacccaaagcccttgcagtgctcctggttcatgcccacgagattgggtacatcgtctgcctgatccagatgttcttcatccatgcattctcctccatggagtcaggggtacttgtggccatggctctggatcgctatgtagccatttgtcaccccttgcaccattccacaatcctgcatccaggggtcatagggcgcatcggaatggtggtgctggtgaggggattactactccttatccccttccccattttgttgggaacacttatcttctgccaagccaccatcataggccatgcctattgtgaacatatggctgttgtgaaacttgcctgctcagaaaccacagtcaatcgagcttatgggctgactatggccttgcttgtgattgggctggatgttctggccattggtgtttcctatgcccacatcctccaggcagtgctgaaggtaccagggagtgaggcccgacttaaggcgtttagcacatgtggctctcatatttgtgtcatcctggtcttctatgtccctggaattttctccttcctcactcaccgctttggtcatcatgtaccccatcatgtccatgttcttctggccacacggtatctcctcatgccacctgcgctcaatcctcttgtctatggagtgaagactcagcagatccgccagcgagtgctcagagtgtttacacaaaaggattga

SEQ ID NO: 316 - protein, 329 aa, Homo sapiens
MTLVSFFSFLSKPLIMLLSNSSWRLSQPSFLLVGIPGLEESQHWIALPLGILYLLALVGNVTILFIIWMDPSLHQSMYLFLSMLAAIDLVLASSTAPKALAVLLVHAHEIGYIVCLIQMFFIHAFSSMESGVLVAMALDRYVAICHPLHHSTILHPGVIGRIGMVVLVRGLLLLIPFPILLGTLIFCQATIIGHAYCEHMAVVKLACSETTVNRAYGLTMALLVIGLDVLAIGVSYAHILQAVLKVPGSEARLKAFSTCGSHICVILVFYVPGIFSFLTHRFGHHVPHHVHVLLATRYLLMPPALNPLVYGVKTQQIRQRVLRVFTQKD

SEQ ID NO: 317 - DNA, 960 bp, Homo sapiens
  CDS (1)..(960)
atgaatttggattcttttttctctttcctcctcaagtcattgataatggcacttagcaattccagctggaggctaccccagccttcttttttcctggtaggaattccgggtttagaggaaagccagcactggatcgcactgcccctgggcatcctttacctccttgctctagtgggcaatgttaccattctcttcatcatctggatggacccatccttgcaccaatctatgtacctcttcctgtccatgctagctgccatcgacctggttgtggcctcctccactgcacccaaagcccttgcagtgctcctggttcgtgcccaagagattggttacactgtctgcctgatccagatgttcttcacccatgcattctcctccatggagtcaggggtacttgtggccatggctctggatcgctatgtagccatttgtcaccccttgcaccattccacaatcctgcatccaggggtcatagggcacatcggaatggtggtgctggtgcggggattactactcctcatccccttcctcattctgttgcgaaaacttatcttctgccaagccaccatcataggccatgcctattgtgaacatatggctgttgtgaaacttgcctgctcagaaaccacagtcaatcgagcttatgggctgactgtggccttgcttgtggttgggctggatgtcctggccattggtgtttcctatgcccacattctccaggcagtgctgaaggtaccaggaaatgaggcccgacttaaggcctttagcacatgtggctctcatgtttgtgtcatcctggtcttctatatcccgggaatgttctccttcctcactcaccgctttggtcatcatgtaccccatcacgtccatgttcttctggccatactgtatcgccttgtgccacctgcactcaatcctcttgtctatagggtgaagacccagaagatccaccagtga

SEQ ID NO: 318 - protein, 319 aa, Homo sapiens
MNLDSFFSFLLKSLIMALSNSSWRLPQPSFFLVGIPGLEESQHWIALPLGILYLLALVGNVTILFIIWMDPSLHQSMYLFLSMLAAIDLVVASSTAPKALAVLLVRAQEIGYTVCLIQMFFTHAFSSMESGVLVAMALDRYVAICHPLHHSTILHPGVIGHIGMVVLVRGLLLLIPFLILLRKLIFCQATIIGHAYCEHMAVVKLACSETTVNRAYGLTVALLVVGLDVLAIGVSYAHILQAVLKVPGNEARLKAFSTCGSHVCVILVFYIPGMFSFLTHRFGHHVPHHVHVLLAILYRLVPPALNPLVYRVKTQKIHQ

SEQ ID NO: 319 - DNA, 951 bp, Homo sapiens
  CDS (1)..(951)
atggttaaccaaagctcccccatgggcttcctccttctgggcttctctgaacacccagcactggaaaggactctctttgtggttgtcttcacttcctacctcttgaccctggtgggcaacacactcatcatcctgctgtctgtactgtaccccaggctccactctccaatgtactttttcctctctgacctctccttcttggacctctgctttaccacaagttgtgtcccccagatgctggtcaacctctggggcccaaagaagaccatcagcttcctgggatgctctgtccagctcttcatcttcctgtccctggggaccactgagtgcatcctcctgacagtgatggcctttgaccgatacgtggctgtctgccagcccctccactatgccaccatcatccacccccgcctgtgctggcagctggcatctgtggcctgggttatgagtctggttcaatcgatagtccagacaccatccaccctccacttgcccttctgtccccaccagcagatagatgactttttatgtgaggtcccatctctgattcgactctcctgtggagatacctcctacaatgaaatccagttggctgtgtccagtgtcatcttcgtggttgtgcctctcagcctcatccttgcctcttatggagccactgcccaggcagtgctgaggattaactctgccacagcatggagaaaggcctttgggacctgctcctcccatctcactgtggtcaccctcttctacagctcagtcattgctgtctacctccagcccaaaaatccgtatgcccaagggaggggcaagttctttggtctcttctatgcagtgggcactccttcacttaaccctctcgtatacaccctgaggaacaaggagataaagcgagcactcaggaggttactagggaaggaaagagactccagggaaagctggagagctgcttaa

SEQ ID NO: 320 - protein, 316 aa, Homo sapiens
MVNQSSPMGFLLLGFSEHPALERTLFVVVFTSYLLTLVGNTLIILLSVLYPRLHSPMYFFLSDLSFLDLCFTTSCVPQMLVNLWGPKKTISFLGCSVQLFIFLSLGTTECILLTVMAFDRYVAVCQPLHYATIIHPRLCWQLASVAWVMSLVQSIVQTPSTLHLPFCPHQQIDDFLCEVPSLIRLSCGDTSYNEIQLAVSSVIFVVVPLSLILASYGATAQAVLRINSATAWRKAFGTCSSHLTVVTLFYSSVIAVYLQPKNPYAQGRGKFFGLFYAVGTPSLNPLVYTLRNKEIKRALRRLLGKERDSRESWRAA

SEQ ID NO: 321 - DNA, 948 bp, Homo sapiens
  CDS (1)..(948)
atggagacgtgggtgaaccagtcctacacagatggcttcttcctcttaggcatcttctcccacagtactgctgaccttgtcctcttctccgtggttatggcggtcttcacagtggccctctgtgggaatgtcctcctcatcttcctcatctacatggaccctcaccttcacacccccatgtacttcttcctcagccagctctccctcatggacctcatgttggtctgtaccaatgtgccaaagatggcagccaacttcctgtctggcaggaagtccatctcctttgtgggctgtggcatacaaattggcctctttgtctgtcttgtgggatctgaggggctcttgctgggactcatggcttatgaccgctatgtggccattagccacccacttcactatcccatcctcatgaatcagagggtctgtctccagattactgggagctcctgggcctttgggataatcgatggcttgatccagatggtggtagtaatgaatttcccctactgtggcttgaggaaggtgaaccatttcttctgtgagatgctatccttgttgaagctggcctgtgtagacacatccctgtttgagaaggtgatatttgcttgctgtgtcttcatgcttctcttcccattctccatcatcgtggcctcctatgctcacattctagggactgtgctgcaaatgcactctgctcaggcctggaaaaaggccctggccacctgctcctcccacctgacagctgtcaccctcttctatggggcagccatgttcatctacctgaggcctaggcactaccgggcccccagccatgacaaggtggcctctatcttctacacggtccttactcccatgctcaaccccctcatttacagcttgaggaacagggaggtgatgggggcactgaggaaggggctggaccgctgcaggatcggcagccagcactga

SEQ ID NO: 322 - protein, 315 aa, Homo sapiens
METWVNQSYTDGFFLLGIFSHSTADLVLFSVVMAVFTVALCGNVLLIFLIYMDPHLHTPMYFFLSQLSLMDLMLVCTNVPKMAANFLSGRKSISFVGCGIQIGLFVCLVGSEGLLLGLMAYDRYVAISHPLHYPILMNQRVCLQITGSSWAFGIIDGLIQMVVVMNFPYCGLRKVNHFFCEMLSLLKLACVDTSLFEKVIFACCVFMLLFPFSIIVASYAHILGTVLQMHSAQAWKKALATCSSHLTAVTLFYGAAMFIYLRPRHYRAPSHDKVASIFYTVLTPMLNPLIYSLRNREVMGALRKGLDRCRIGSQH

SEQ ID NO: 323 - DNA, 759 bp, Homo sapiens
  CDS (1)..(759)
atgtacctgttcctcagccacttggcttttgtggacatagggcttgccacagtagtcacacctataatgcttatgggattcctaagacgtggaacagccctccctgtcactagctgtgaagcccagctctgttctgtagtcatgtttgggacgtctgaatgcttcctactggcgaccatggcctatgatcgctatgtggccatctgctcacccctggtgaactccacccacttgtcccccataatctgcatactcttagtgggggtttgctacctgggtggatgtgtgaatgcctcaacatttactagttgtttattgagtctgtctttctgtggaccaaatcagatagatcattttttctgtgatttctctcctttgttgaaactttcctgctcaaatatctccattcctgaaattatcccttccatctcttctggatctatcattgtggtcacagtatttgccatagccatctcctacatctacatcctcatcaccatcctgaagatgcgctccgccgaggggcgccacaaggccttctccacctgtacctcccacctcgctgcggttactctctactatggaacgattaccttcatttatgtgatgcccaaatccagttactcaactagccagaacagattgatatcgctgtcctacacagtggtaatccccatactgaacccctttatctatagtctgaggaacagagatgtaaaggaggcactaagaaaggcaactgtcagaatatattcttag

SEQ ID NO: 324 - protein, 252 aa, Homo sapiens
MYLFLSHLAFVDIGLATVVTPIMLMGFLRRGTALPVTSCEAQLCSVVMFGTSECFLLATMAYDRYVAICSPLVNSTHLSPIICILLVGVCYLGGCVNASTFTSCLLSLSFCGPNQIDHFFCDFSPLLKLSCSNISIPEIIPSISSGSIIVVTVFAIAISYIYILITILKMRSAEGRHKAFSTCTSHLAAVTLYYGTITFIYVMPKSSYSTSQNRLISLSYTVVIPILNPFIYSLRNRDVKEALRKATVRIYS

SEQ ID NO: 325 - DNA, 969 bp, Homo sapiens
  CDS (1)..(969)
atgaattccctgaaggacgggaatcacaccgctctgacggggttcatcctattgggcttaacagatgatccaatccttcgagtcatcctcttcatgatcatcctatctggtaatctcagcataattattcttatcagaatttcttctcagctccatcatcctatgtatttctttctgagccacttggcttttgctgacatggcctattcatcttctgtcacacccaacatgcttgtaaacttcctggtggagagaaatacagtctcctaccttggatgtgccatccagcttggttcagcggctttctttgcaacagtcgaatgcgtccttctggctgccatggcctatgaccgctttgtggcaatttgcagtccactgctttattcaaccaaaatgtccacacaagtcagtgtccagctactcttagtagtttacatagctggttttctcattgctgtctcctatactacttccttctattttttactcttctgtggaccaaatcaagtcaatcattttttctgtgatttcgctcccttacttgaactctcctgttctgatatcagtgtctccacagttgttctctcattttcttctggatccatcattgtggtcactgtgtgtgtcatagccgtctgctacatctatatcctcatcaccatcctgaagatgcgctccactgaggggcaccacaaggccttctccacctgcacttcccacctcactgtggttaccctgttctatgggaccattaccttcatttatgtgatgcccaattttagctactcaactgaccagaacaaggtggtgtctgtgttgtacacagtggtgattcccatgttgaaccccctgatctacagcctcaggaacaaggagattaagggggctctgaagagagagcttgttagaaaaatactttctcatgatgcttgttattttagtagaacttcaaataatgatattacatag

SEQ ID NO: 326 - protein, 322 aa, Homo sapiens
MNSLKDGNHTALTGFILLGLTDDPILRVILFMIILSGNLSIIILIRISSQLHHPMYFFLSHLAFADMAYSSSVTPNMLVNFLVERNTVSYLGCAIQLGSAAFFATVECVLLAAMAYDRFVAICSPLLYSTKMSTQVSVQLLLVVYIAGFLIAVSYTTSFYFLLFCGPNQVNHFFCDFAPLLELSCSDISVSTVVLSFSSGSIIVVTVCVIAVCYIYILITILKMRSTEGHHKAFSTCTSHLTVVTLFYGTITFIYVMPNFSYSTDQNKVVSVLYTVVIPMLNPLIYSLRNKEIKGALKRELVRKILSHDACYFSRTSNNDIT

SEQ ID NO: 327 - DNA, 942 bp, Homo sapiens
  CDS (1)..(942)
atggctggggaaaaccatactacactgcctgaattcctccttctgggattctctgacctcaaggccctgcagggccccctgttctgggtggtgcttctggtctacctggtcaccttgctgggtaactccctgatcatcctcctcacacaggtcagccctgccctgcactcccccatgtacttcttcctgcgccaactctcagtggtggagctcttctacaccactgacatcgtgcccaggaccctggccaatctgggctccccgcatccccaggccatctctttccagggctgtgcagcccagatgtacgtcttcattgtcctgggcatctcggagtgctgcctgctcacggccatggcctatgaccgatatgttgccatctgccagcccctacgctattccaccctcttgagcccacgggcctgcttggccatggtggggtcctcctggctcacaggcatcatcacggccaccacccatgcctccctcatcttctctctaccttttcgcagccacccgatcatcccgcactttctctgtgacatcctgccagtactgaggctggcaagtgctgggaagcacaggagcgagatctccgtgatgacagccaccatagtcttcattatgatccccttctctctgattgtcacctcttacatccgcatcctgggtgccatcctagcaatggcctccacccagagccgccgcaaggtcttctccacctgctcctcccatctgctcgtggtctctctcttctttggaacagccagcatcacctacatccggccgcaggcaggctcctctgttaccacagaccgcgtcctcagtctcttctacacagtcatcacacccatgctcaaccccatcatctacacccttcggaacaaggacgtgaggagggccctgcgacacttggtgaagaggcagcgcccctcaccctga

SEQ ID NO: 328 - protein, 313 aa, Homo sapiens
MAGENHTTLPEFLLLGFSDLKALQGPLFWVVLLVYLVTLLGNSLIILLTQVSPALHSPMYFFLRQLSVVELFYTTDIVPRTLANLGSPHPQAISFQGCAAQMYVFIVLGISECCLLTAMAYDRYVAICQPLRYSTLLSPRACLAMVGSSWLTGIITATTHASLIFSLPFRSHPIIPHFLCDILPVLRLASAGKHRSEISVMTATIVFIMIPFSLIVTSYIRILGAILAMASTQSRRKVFSTCSSHLLVVSLFFGTASITYIRPQAGSSVTTDRVLSLFYTVITPMLNPIIYTLRNKDVRRALRHLVKRQRPSP

SEQ ID NO: 329 - DNA, 939 bp, Homo sapiens
  CDS (1)..(939)
atggagcgggtcaatgagactgtggtgagagaggtcatcttcctcggcttctcatccctggccaggctgcagcagctgctctttgttatcttcctgctcctctacctgttcactctgggcaccaatgcaatcatcatttccaccattgtcctggacagggcccttcatatccccatgtacttcttccttgccatcctctcttgctctgagatttgctacaccttcatcattgtacccaagatgctggttgacctgctgtcccagaagaagaccatttctttcctgggctgtgccatccaaatgttttccttcctcttccttggctgctctcactcctttctgctggcagtcatgggttatgatcgttacatagccatctgtaacccactgcgctactcagtgctaatgggacatggggtgtgtatgggactagtggctgctgcctgtgcctgtggcttcactgttgcacagatcatcacatccttggtatttcacctgcctttttattcctccaatcaactacatcacttcttctgtgacattgctcctgtcctcaagctggcatctcaccataaccactttagtcagattgtcatcttcatgctctgtacattggtcctggctatccccttattgttgatcttggtgtcctatgttcacatcctctctgccatacttcagtttccttccacactgggtaggtgcaaagctttttctacctgtgtatctcacctcattattgtcactgtccactatggctgtgcctcctttatctacttaaggcctcagtccaactactcctcaagccaggatgctctaatatcagtatcctacactattataactccattgttcaacccaatgatttatagcttgagaaataaagagttcaaatcagctctttgtaaaattgtgagaagaacaatttccctgttgtaa

SEQ ID NO: 330 - protein, 312 aa, Homo sapiens
MERVNETVVREVIFLGFSSLARLQQLLFVIFLLLYLFTLGTNAIIISTIVLDRALHIPMYFFLAILSCSEICYTFIIVPKMLVDLLSQKKTISFLGCAIQMFSFLFLGCSHSFLLAVMGYDRYIAICNPLRYSVLMGHGVCMGLVAAACACGFTVAQIITSLVFHLPFYSSNQLHHFFCDIAPVLKLASHHNHFSQIVIFMLCTLVLAIPLLLILVSYVHILSAILQFPSTLGRCKAFSTCVSHLIIVTVHYGCASFIYLRPQSNYSSSQDALISVSYTIITPLFNPMIYSLRNKEFKSALCKIVRRTISLL

SEQ ID NO: 331 - DNA, 1008 bp, Homo sapiens
  CDS (1)..(1008)
atgccccaaattcttatattcacatacctgaatatgttttacttctttccccctttgcagatcttggcagaaaacctcaccatggtcaccgaattcctgttgctgggtttttccagccttggtgaaattcagctggccctctttgtagtttttctttttctgtatctagtcattcttagtggcaatgtcaccattatcagtgtcatccacctggataaaagcctccacacaccaatgtacttcttccttggcattctctcaacatctgagaccttctacacctttgtcattctacccaagatgctcatcaatctactttctgtggccaggacaatctccttcaactgttgtgctcttcaaatgttcttcttccttggttttgccattaccaactgcctgctattgggtgtgatgggttatgatcgctatgctgccatttgtcaccctctgcattaccccactcttatgagctggcaggtgtgtggaaaactggcagctgcctgtgcaattggtggcttcttggcctctcttacagtagtaaatttagttttcagcctccctttttgtagcgccaacaaagtcaatcattacttctgtgacatctcagcagtcattcttctggcttgtaccaacacagatgttaacgaatttgtgatattcatttgtggagttcttgtacttgtggttccctttctgtttatctgtgtttcttatctctgcattctgaggactatcctgaagattccctcagctgagggcagacggaaagcgttttccacctgcgcctctcacctcagtgttgttattgttcattatggctgtgcttccttcatctacctgaggcctacagcaaactatgtgtccaacaaagacaggctggtgacggtgacatacacgattgtcactccattactaaaccccatggtttatagcctcagaaacaaggatgtccaacttgctatcagaaaagtgttgggcaagaaaggttctctaaaactatataattga

SEQ ID NO: 332 - protein, 335 aa, Homo sapiens
MPQILIFTYLNMFYFFPPLQILAENLTMVTEFLLLGFSSLGEIQLALFVVFLFLYLVILSGNVTIISVIHLDKSLHTPMYFFLGILSTSETFYTFVILPKMLINLLSVARTISFNCCALQMFFFLGFAITNCLLLGVMGYDRYAAICHPLHYPTLMSWQVCGKLAAACAIGGFLASLTVVNLVFSLPFCSANKVNHYFCDISAVILLACTNTDVNEFVIFICGVLVLVVPFLFICVSYLCILRTILKIPSAEGRRKAFSTCASHLSVVIVHYGCASFIYLRPTANYVSNKDRLVTVTYTIVTPLLNPMVYSLRNKDVQLAIRKVLGKKGSLKLYN

SEQ ID NO: 333 - DNA, 978 bp, Homo sapiens
  CDS (1)..(978)
atgaccaccataattctggaagtagataatcatacagtgacaacacgtttcattcttctggggtttccaacacgaccagccttccagcttctctttttctccattttcctggcaacctatctgctgacactgctggagaatcttcttatcatcttagctatccacagtgatgggcagctgcataagcccatgtacttcttcttgagccacctctccttcctggagatgtggtatgtcacagtcatcagccccaagatgcttgttgacttcctcagtcatgacaagagtatttccttcaatggctgcatgactcaactttacttttttgtgacctttgtctgcactgagtacatccttcttgctatcatggcctttgaccgctatgtagccatttgtaatccactacgctacccagtcatcatgaccaaccagctctgtggcacactggctggaggatgctggttctgtggactcatgactgccatgattaagatggtttttatagcacaacttcactactgtggcatgcctcagatcaatcactacttttgtgatatctctccactccttaacgtctcctgtgaggatgcctcacaggctgagatggtggacttcttcttggccctcatggtcattgctattcctctttgtgttgtggtggcatcctacgctgctatccttgccaccatcctcaggatcccttctgctcagggccgccaaaaggcattctccacctgtgcctcccacctgaccgtcgtaattctcttctattccatgacacttttcacctatgcccgtcccaaactcatgtatgcctacaattccaacaaagtggtatctgttctctacactgtcattgttccactcctcaaccccatcatttactgtctgaggaaccatgaagtaaaggcagccctcagaaagaccatacattgcagaggaagtgggccccagggaaatggggctttcagtagttaa

SEQ ID NO: 334 - protein, 325 aa, Homo sapiens
MTTIILEVDNHTVTTRFILLGFPTRPAFQLLFFSIFLATYLLTLLENLLIILAIHSDGQLHKPMYFFLSHLSFLEMWYVTVISPKMLVDFLSHDKSISFNGCMTQLYFFVTFVCTEYILLAIMAFDRYVAICNPLRYPVIMTNQLCGTLAGGCWFCGLMTAMIKMVFIAQLHYCGMPQINHYFCDISPLLNVSCEDASQAEMVDFFLALMVIAIPLCVVVASYAAILATILRIPSAQGRQKAFSTCASHLTVVILFYSMTLFTYARPKLMYAYNSNKVVSVLYTVIVPLLNPIIYCLRNHEVKAALRKTIHCRGSGPQGNGAFSS

SEQ ID NO: 335 - DNA, 945 bp, Homo sapiens
  CDS (1)..(945)
atgcgaggtttcaacaaaaccactgtggttacacagttcatcctggtgggtttctccagcctgggggagctccagctgctgctttttgtcatctttcttctcctatacttgacaatcctggtggccaatgtgaccatcatggccgttattcgcttcagctggactctccacactcccatgtatggctttctattcatcctttcattttctgagtcctgctacacttttgtcatcatccctcagctgctggtccacctgctctcagacaccaagaccatctccttcatggcctgtgccacccagctgttctttttccttggctttgcttgcaccaactgcctcctcattgctgtgatgggatatgatcgctatgtagcaatttgtcaccctctgaggtacacactcatcataaacaaaaggctggggttggagttgatttctctctcaggagccacaggtttctttattgctttggtggccaccaacctcatttgtgacatgcgtttttgtggccccaacagggttaaccactatttctgtgacatggcacctgttatcaagttagcctgcactgacacccatgtgaaagagctggctttatttagcctcagcatcctggtaattatggtgccttttctgttaattctcatatcctatggcttcatagttaacaccatcctgaagatcccctcagctgagggcaagaaggcctttgtcacctgtgcctcacatctcactgtggtctttgtccactatggctgtgcctctatcatctatctgcggcccaagtccaagtctgcctcagacaaggatcagttggtggcagtgacctacacagtggttactcccttacttaatcctcttgtctacagtctgaggaacaaagaggtaaaaactgcattgaaaagagttcttggaatgcctgtggcaaccaagatgagctaa

SEQ ID NO: 336 - protein, 314 aa, Homo sapiens
MRGFNKTTVVTQFILVGFSSLGELQLLLFVIFLLLYLTILVANVTIMAVIRFSWTLHTPMYGFLFILSFSESCYTFVIIPQLLVHLLSDTKTISFMACATQLFFFLGFACTNCLLIAVMGYDRYVAICHPLRYTLIINKRLGLELISLSGATGFFIALVATNLICDMRFCGPNRVNHYFCDMAPVIKLACTDTHVKELALFSLSILVIMVPFLLILISYGFIVNTILKIPSAEGKKAFVTCASHLTVVFVHYGCASIIYLRPKSKSASDKDQLVAVTYTVVTPLLNPLVYSLRNKEVKTALKRVLGMPVATKMS

SEQ ID NO: 337 - DNA, 930 bp, Homo sapiens
  CDS (1)..(930)
atggccagtacaagtaatgtgactgagttgattttcactggccttttccaggatccagctgtgcagagtgtatgctttgtggtgtttctccccgtgtaccttgccacggtggtgggcaatggcctcatcgttctgacggtcagtatcagcaagagtctggattctcccatgtacttcttccttagctgcctgtccttggtggagatcagttattcctccactatcgcccctaaattcatcatagacttacttgccaagattaaaaccatctctctggaaggctgtctgactcagatattcttcttccacttctttggggttgctgagatccttttgattgtggtgatggcctatgattgctacgtggccatttgcaagcctcttcattatatgaacattatcagtcgtcaactgtgtcaccttctggtggctggttcctggctggggggcttttgtcactccataattcagattctcgttatcatccaattgcccttctgtggtcccaatgtgattgaccactatttctgtgacctccagcctttattcaagcttgcctgcactgacaccttcatggagggggttattgtgttggccaacagtggattattctctgtcttctccttcctcatcttggtgtcctcttatattgtcattctggtcaacttgaggaaccattctgcagaggggaggcacaaagccctctccacctgtgcttctcacatcacagtggtcatcttgttttttggacctgctatcttcctctacatgcgaccttcttccactttcactgaagataaacttgtggctgtattctacacggtcatcacccccatgctgaaccccatcatttacacactcaggaatgcagaggtgaaaatcgccataagaagattgtggagcaaaaaggagaatccagggagggagtga

SEQ ID NO: 338 - protein, 309 aa, Homo sapiens
MASTSNVTELIFTGLFQDPAVQSVCFVVFLPVYLATVVGNGLIVLTVSISKSLDSPMYFFLSCLSLVEISYSSTIAPKFIIDLLAKIKTISLEGCLTQIFFFHFFGVAEILLIVVMAYDCYVAICKPLHYMNIISRQLCHLLVAGSWLGGFCHSIIQILVIIQLPFCGPNVIDHYFCDLQPLFKLACTDTFMEGVIVLANSGLFSVFSFLILVSSYIVILVNLRNHSAEGRHKALSTCASHITVVILFFGPAIFLYMRPSSTFTEDKLVAVFYTVITPMLNPIIYTLRNAEVKIAIRRLWSKKENPGRE

SEQ ID NO: 339 - DNA, 918 bp, Homo sapiens
  CDS (1)..(918)
atggttgctacaaacaatgtgactgaaataattttcgtgggattttcccagaattggagtgagcagagggtcatttctgtgatgtttctcctcatgtacacagctgttgtgctgggcaatggcctcattgtggtgaccatcctggccagcaaagtgctcacctcccccatgtatttctttctcagctacttatcctttgtggagatctgctactgttctgtcatggcccccaagcttatctttgactcctttatcaagaggaaagtcatttctctcaagggctgcctcacacagatgttttccctccatttctttggtggcactgaggcctttctcctgatggtgatggcctatgaccgctatgtggccatctgcaagcccttgcactacatggccatcatgaaccagcgaatgtgtggtctcctcgtgaggatagcatggggcgggggcctgctgcattctgttgggcaaaccttcctgattttccagctcccgttctgtggccccaacatcatggaccactacttctgtgatgtccacccagtgctggagctggcctgcgcagacaccttcttcattagcctgctgatcatcaccaatggcggctccatctccgtagtcagtttcttcgtgctgatggcttcctacctgatcatcctgcacttcctgagaagccacaacttggaggggcagcacaaggccctctccacctgtgcctctcatgtcacagttgtcgacctgttcttcataccttgctccttggtctatattaggccctgtgtcaccctccctgcagacaagatagttgctgtattttatacagtggtcacacctctcttaaaccctgtgatttactccttcaggaatgctgaagtgaaaaatgccatgaggagatttattgggggaaaagtaatttga

SEQ ID NO: 340 - protein, 305 aa, Homo sapiens
MVATNNVTEIIFVGFSQNWSEQRVISVMFLLMYTAVVLGNGLIVVTILASKVLTSPMYFFLSYLSFVEICYCSVMAPKLIFDSFIKRKVISLKGCLTQMFSLHFFGGTEAFLLMVMAYDRYVAICKPLHYMAIMNQRMCGLLVRIAWGGGLLHSVGQTFLIFQLPFCGPNIMDHYFCDVHPVLELACADTFFISLLIITNGGSISVVSFFVLMASYLIILHFLRSHNLEGQHKALSTCASHVTVVDLFFIPCSLVYIRPCVTLPADKIVAVFYTVVTPLLNPVIYSFRNAEVKNAMRRFIGGKVI

SEQ ID NO: 341 - DNA, 912 bp, Homo sapiens
  CDS (1)..(912)
atgactgaattcatttttctggtactttctcccaaccaggaggtgcagagggtttgctttgtgatatttctgttcttgtacacagcaattgtgctggggaatttcctcattgtgctcactgtcatgaccagcagaagccttggttcccccatgtacttcttcctcagctacctctccttcatggagatctgctactcctccgctacagcccccaaactcatctcagatctgctggctgaaaggaaagtcatatcttggtggggctgcatggcacagcttttcttcttgcacttctttggtggcactgagattttcctgctcactgtgatggcctatgaccactatgtggccatctgcaagcccctcagctacaccaccatcatgaactggcaggtgtgtactgtccttgtaggaatagcatgggtgggaggcttcatgcattcctttgcacaaatccttctcatcttccacctgctcttctgtggccccaatgtgatcaatcactatttctgtgacctagttccccttctcaaacttgcctgctctgacaccttcctcattggtctgctgattgttgccaatggaggcaccctgtctgtgatcagttttggggtcctcttagcatcctatatggtcatcttgctccatctgagaacctggagctctgaagggtggtgcaaagccctctccacctgtgggtcccatttcgctgtggttatcttgttctttgggccctgcgtcttcaactctctgaggccttctaccactctgcccatagacaagatggtggctgtgttctacacagtgataaccgcgatcctgaaccctgtcatctactctctgagaaatgctgaaatgaggaaggccatgaagaggctgtggattaggacattgagactaaatgagaaatag

SEQ ID NO: 342 - protein, 303 aa, Homo sapiens
MTEFIFLVLSPNQEVQRVCFVIFLFLYTAIVLGNFLIVLTVMTSRSLGSPMYFFLSYLSFMEICYSSATAPKLISDLLAERKVISWWGCMAQLFFLHFFGGTEIFLLTVMAYDHYVAICKPLSYTTIMNWQVCTVLVGIAWVGGFMHSFAQILLIFHLLFCGPNVINHYFCDLVPLLKLACSDTFLIGLLIVANGGTLSVISFGVLLASYMVILLHLRTWSSEGWCKALSTCGSHFAVVILFFGPCVFNSLRPSTTLPIDKMVAVFYTVITAILNPVIYSLRNAEMRKAMKRLWIRTLRLNEK

SEQ ID NO: 343 - DNA, 921 bp, Homo sapiens
  CDS (1)..(921)
atgactgaattctttctggtggggctttcccaatatccagagctccagctttttctgttcctgctctgcctcatcatgtacatgataatcctcctgggaaatagcctcctcattatcatcaccatcttggattctcgcctccatactcccatgtatttctttcttggaaacctctcattcttggacatctgttacacatcctcatccattcctccaatgcttattatatttatgtctgagagaaaatccatctccttcattggctgtgctctgcagatggttgtgtcccttggcttgggctccactgagtgtgtcctcctggctgtgatggcctatgaccactatgtggccatctgcaacccactgaggtactccatcatcatgaacggagtgctgtatgtgcaaatggctgcatggtcctggatcataggctgtctgacctccctattgcaaacagttctgacaatgatgttgcctttctgtgggaataatgtcattgatcatattacctgtgaaattttggcccttctaaaacttgtttgttcagatatcaccatcaatgtgcttatcatgacagtgacaaatattgtttcactggtgattcttctactgttaattttcatctcctatgtgtttattctctcttccatcctgagaattaattgtgctgagggaagaaagaaagccttctctacctgttcagcgcactcgattgtggtcatcttattctacggttcagccctttttatgtacatgaaacccaagtcaaagaacactaatacatctgatgagattattgggctgtcttatggagtggtaagcccaatgttaaatcccatcatctatagcctcaggaataaagaggtcaaagaggctgtaaagaaagtcctgagcagacatctgcatttattgaaaatgtga

SEQ ID NO: 344 - protein, 306 aa, Homo sapiens
MTEFFLVGLSQYPELQLFLFLLCLIMYMIILLGNSLLIIITILDSRLHTPMYFFLGNLSFLDICYTSSSIPPMLIIFMSERKSISFIGCALQMVVSLGLGSTECVLLAVMAYDHYVAICNPLRYSIIMNGVLYVQMAAWSWIIGCLTSLLQTVLTMMLPFCGNNVIDHITCEILALLKLVCSDITINVLIMTVTNIVSLVILLLLIFISYVFILSSILRINCAEGRKKAFSTCSAHSIVVILFYGSALFMYMKPKSKNTNTSDEIIGLSYGVVSPMLNPIIYSLRNKEVKEAVKKVLSRHLHLLKM

SEQ ID NO: 345 - DNA, 1029 bp, Homo sapiens
  CDS (1)..(1029)
atgactgaaacatccctgtcttctcagtgcttccctatgtcggtcctcaataataccattgctgagcctctgatcttcctcctgatgggcattccaggcctgaaagccacccagtactggatctccatccctttttgtctcctatatgttgttgccgtctctggaaatagcatgatcctgtttgtggtcctctgtgaacggagcctccataagcctatgtactatttcctctctatgctttcagccacagacctgagcttgtccctgtgtacactttctactacccttggtgtcttctggtttgaagcccgagaaatcaacctaaatgcctgcattgcccagatgttctttctacacggatttactttcatggagtctggggttctactggccatggcctttgatcgttttgtggccatctgttacccactgagatacactaccatccttaccaatgcccgaattgccaagattgggatgagcatgttgataagaaatgttgccgtcatgttgccagtcatgctctttgtcaagaggttgtccttctgcagttctatggtcctttcacattcttactgctaccatgttgatctcatccaactctcctgcacagacaataggatcaacagcatccttggtctgtttgcgcttttgtccactacagggtttgactgcccttgcatcctgctctcctatatcctgatcattcgatctgtcctcagcattgcttcctcagaagagaggcggaaagccttcaacacctgcacatcccacatcagtgctgtttccatcttctacctccctctcatcagtttgtctcttgtccatcgctatggccattcagcacctccatttgtccacatcatcatggccaatgtctttctgctaatccctcctgtgctcaaccctattatttacagtgtaaagattaagcagattcaaaaggccattatcaaggtcttaattcagaagcactccaaatctaatcatcagctatttctgattagagataaagccatttatgaataa

SEQ ID NO: 346 - protein, 342 aa, Homo sapiens
MTETSLSSQCFPMSVLNNTIAEPLIFLLMGIPGLKATQYWISIPFCLLYVVAVSGNSMILFVVLCERSLHKPMYYFLSMLSATDLSLSLCTLSTTLGVFWFEAREINLNACIAQMFFLHGFTFMESGVLLAMAFDRFVAICYPLRYTTILTNARIAKIGMSMLIRNVAVMLPVMLFVKRLSFCSSMVLSHSYCYHVDLIQLSCTDNRINSILGLFALLSTTGFDCPCILLSYILIIRSVLSIASSEERRKAFNTCTSHISAVSIFYLPLISLSLVHRYGHSAPPFVHIIMANVFLLIPPVLNPIIYSVKIKQIQKAIIKVLIQKHSKSNHQLFLIRDKAIYE

SEQ ID NO: 347 - DNA, 903 bp, Homo sapiens
  CDS (1)..(903)
atgtacctggtcacggtgctgaggaacctgctcatcatcctggctgtcagctctgactcccacctccacacccccatgtgcttcttcctctccaacctgtgctgggctgacatcggtttcacctcggccatggttcccaagatgattgtggacatgcagtcgcatagcagagtcatctcttatgcgggctgcctgacacagatgtctttctttgtcctttttgcatgtatagaagacatgctcctgacagtgatggcctatgaccgatttgtggccatctgtcaccccctgcactacccagtcatcatgaatcctcaccttggtgtcttcttagttttggtgtcctttttcctcagcctgttggattcccagctgcacagttggattgtgttacaattcaccttcttcaagaatgtggaaatctccaattttgtctgtgacccatctcaacttctcaaccttgcctgttctgacagtgtcatcaatagcatattcatatatttagatagtattatgtttggttttcttcccatttcagggatccttttgtcttacgctaacaatgtcccctccattctaagaatttcatcatcagataggaagtctaaagccttctccacctgtggctctcacctggcagttgtttgcttattttatggaacaggcattggcgtgtacctgacttcagctgtgtcaccaccccccaggaatggtgtggtggcatcagtgatgtacgctgtggtcacccccatgctgaaccctttcatctacagcctgagaaatagggacattcaaagtgccctgtggaggctgcgcagcagaacagtcgaatctcatgatctgttatctcaagatctgctccatcctttttcttgtgtgggtgagaaaggtcaaccacattaa

SEQ ID NO: 348 - protein, 300 aa, Homo sapiens [sequence omitted]

SEQ ID NO: 349 - DNA, 993 bp, Homo sapiens
  CDS (1)..(993)
atgtgttcttttttcttgtgccaaacaggtaaacaggcaaaaatatcaatgggagaagaaaaccaaacctttgtgtccaagtttatcttcctgggtctttcacaggacttgcagacccagatcctgctatttatccttttcctcatcatttatctgctgaccgtgcttggaaaccagctcatcatcattctcatcttcctggattctcgccttcacactcccatgtatttttttcttagaaatctctcctttgcagatctctgtttctctactagcattgtccctcaagtgttggttcacttcttggtaaagaggaaaaccatttctttttatgggtgtatgacacagataattgtctttcttctggttgggtgtacagagtgtgcgctgctggcagtgatgtcctatgaccggtatgtggctgtctgcaagcccctgtactactctaccatcatgacacaacgggtgtgtctctggctgtccttcaggtcctgggccagtggggcactagtgtctttagtagataccagctttactttccatcttccctactggggacagaatataatcaatcactacttttgtgaacctcctgccctcctgaagctggcttccatagacacttacagcacagaaatggccatcttttcaatgggcgtggtaatcctcctggcccctgtctccctgattcttggttcttattggaatattatctccactgttatccagatgcagtctggggaagggagactcaaggctttttccacctgtggctcccatcttattgttgttgtcctcttctatgggtcaggaatattcacctacatgcgaccaaactccaagactacaaaagaactggataaaatgatatctgtgttctatacagcggtgactccaatgttgaaccccataatttatagcttgaggaacaaagatgtcaaaggggctctcaggaaactagttgggagaaagtgcttctctcataggcagtga

SEQ ID NO: 350 - protein, 330 aa, Homo sapiens
MCSFFLCQTGKQAKISMGEENQTFVSKFIFLGLSQDLQTQILLFILFLIIYLLTVLGNQLIIILIFLDSRLHTPMYFFLRNLSFADLCFSTSIVPQVLVHFLVKRKTISFYGCMTQIIVFLLVGCTECALLAVMSYDRYVAVCKPLYYSTIMTQRVCLWLSFRSWASGALVSLVDTSFTFHLPYWGQNIINHYFCEPPALLKLASIDTYSTEMAIFSMGVVILLAPVSLILGSYWNIISTVIQMQSGEGRLKAFSTCGSHLIVVVLFYGSGIFTYMRPNSKTTKELDKMISVFYTAVTPMLNPIIYSLRNKDVKGALRKLVGRKCFSHRQ

SEQ ID NO: 351 - DNA, 972 bp, Homo sapiens
  CDS (1)..(972)
atgagtcacaccaatgttaccatcttccatcctgcagtttttgtccttcctggcatccctgggttggaggcttatcacatttggctgtcaatacctctttgcctcatttacatcactgcagtcctgggaaacagcatcctgatagtggttattgtcatggaacgtaaccttcatgtgcccatgtatttcttcctctcaatgctggccgtcatggacatcctgctgtctaccaccactgtgcccaaggccctagccatcttttggcttcaagcacataacattgcttttgatgcctgtgtcacccaaggcttctttgtccatatgatgtttgtgggggagtcagctatcctgttagccatggcctttgatcgctttgtggccatttgtgccccactgagatatacaacagtgctaacatggcctgttgtggggaggattgctctggccgtcatcacccgaagcttctgcatcatcttcccagtcatattcttgctgaagcggctgcccttctgcctaaccaacattgttcctcactcctactgtgagcatattggagtggctcgtttagcctgtgctgacatcactgttaacatttggtatggcttctcagtgcccattgtcatggtcatcttggatgttatcctcatcgctgtgtcttactcactgatcctccgagcagtgtttcgtttgccctcccaggatgctcggcacaaggccctcagcacttgtggctcccacctctgtgtcatccttatgttttatgttccatccttctttaccttattgacccatcattttgggcgtaatattcctcaacatgtccatatcttgctggccaatctttatgtggcagtgccaccaatgctgaaccccattgtctatggtgtgaagactaagcagatacgtgagggtgtagcccaccggttctttgacatcaagacttggtgctgtacctcccctctgggctcatga

SEQ ID NO: 352 - protein, 323 aa, Homo sapiens
MSHTNVTIFHPAVFVLPGIPGLEAYHIWLSIPLCLIYITAVLGNSILIVVIVMERNLHVPMYFFLSMLAVMDILLSTTTVPKALAIFWLQAHNIAFDACVTQGFFVHMMFVGESAILLAMAFDRFVAICAPLRYTTVLTWPVVGRIALAVITRSFCIIFPVIFLLKRLPFCLTNIVPHSYCEHIGVARLACADITVNIWYGFSVPIVMVILDVILIAVSYSLILRAVFRLPSQDARHKALSTCGSHLCVILMFYVPSFFTLLTHHFGRNIPQHVHILLANLYVAVPPMLNPIVYGVKTKQIREGVAHRFFDIKTWCCTSPLGS

SEQ ID NO: 353 - DNA, 990 bp, Homo sapiens
  CDS (1)..(990)
atgtccagcactcttggccacaacatggaatctcctaatcacactgatgttgacccttctgtcttcttcctcctgggcatcccaggtctggaacaatttcatttgtggctctcactccctgtgtgtggcttaggcacagccacaattgtgggcaatataactattctggttgttgttgccactgaaccagtcttgcacaagcctgtgtacctttttctgtgcatgctctcaaccatcgacttggctgcctctgtctccacagttcccaagctactggctatcttctggtgtggagccggacatatatctgcctctgcctgcctggcacagatgttcttcattcatgccttctgcatgatggagtccactgtgctactggccatggcctttgatcgctacgtggccatctgccacccactccgctatgccacaatcctcactgacaccatcattgcccacataggggtggcagctgtagtgcgaggctccctgctcatgctcccatgtcccttccttattgggcgtttgaacttctgccaaagccatgtgatcctacacacgtactgtgagcacatggctgtggtgaagctggcctgtggagacaccaggcctaaccgtgtgtatgggctgacagctgcactgttggtcattggggttgacttgttttgcattggtctctcctatgccctaagtgcacaagctgtccttcgcctctcatcccatgaagctcggtccaaggccctagggacctgtggttcccatgtctgtgtcatcctcatctcttatacaccagccctcttctccttttttacacaccgctttggccatcacgttccagtccatattcacattcttttggccaatgtttatctgcttttgccacctgctcttaatcctgtggtatatggagttaagaccaaacagatccgtaaaagagttgtcagggtgtttcaaagtgggcagggaatgggcatcaaggcatctgagtga

SEQ ID NO: 354 - protein, 329 aa, Homo sapiens [sequence omitted]

SEQ ID NO: 355 - DNA, 1200 bp, Homo sapiens
  CDS (1)..(1200)
atgtctttcacttctctcataccctcactctgtttctccttgactctcccattcctgttttgttatctttctttattgccgtttctttctgcttttctgtttatcactcgctggctacttgcctttctctctctattctctgtctctgtccctgtttcttctgtttcaagttcaatggttctctgtctctatctctctgtttctgcctctccgtctgtcttttgtttctcttgcatgcagggccccatactgtggatcatggcaaatctgagccagccctccgaatttgtcctcttgggcttctcctcctttggtgagctgcaggcccttctgtatggccccttcctcatgctttatcttctcgccttcatgggaaacaccatcatcatagttatggtcatagctgacacccacctacatacacccatgtacttcttcctgggcaatttttccctgctggagatcttggtaaccatgactgcagtgcccaggatgctctcagacctgttggtcccccacaaagtcattaccttcactggctgcatggtccagttctacttccacttttccctggggtccacctccttcctcatcctgacagacatggcccttgatcgctttgtggccatctgccacccactgcgctatggcactctgatgagccgggctatgtgtgtccagctggctggggctgcctgggcagctcctttcctagccatggtacccactgtcctctcccgagctcatcttgattactgccatggcgacgtcatcaaccacttcttctgtgacaatgaacctctcctgcagttgtcatgctctgacactcgcctgttggaattctgggactttctgatggccttgacctttgtcctcagctccttcctggtgaccctcatctcctatggctacatagtgaccactgtgctgcggatcccctctgccagcagctgccagaaggctttctccacttgcgggtctcacctcacactggtcttcatcggctacagtagtaccatctttctgtatgtcaggcctggcaaagctcactctgtgcaagtcaggaaggtcgtggccttggtgacttcagttctcaccccctttctcaatccctttatccttaccttctgcaatcagacagttaaaacagtgctacaggggcagatgcagaggctgaaaggcctttgcaaggcacaatga

SEQ ID NO: 356 - protein, 399 aa, Homo sapiens
MSFTSLIPSLCFSLTLPFLFCYLSLLPFLSAFLFITRWLLAFLSLFSVSVPVSSVSSSMVLCLYLSVSASPSVFCFSCMQGPILWIMANLSQPSEFVLLGFSSFGELQALLYGPFLMLYLLAFMGNTIIIVMVIADTHLHTPMYFFLGNFSLLEILVTMTAVPRMLSDLLVPHKVITFTGCMVQFYFHFSLGSTSFLILTDMALDRFVAICHPLRYGTLMSRAMCVQLAGAAWAAPFLAMVPTVLSRAHLDYCHGDVINHFFCDNEPLLQLSCSDTRLLEFWDFLMALTFVLSSFLVTLISYGYIVTTVLRIPSASSCQKAFSTCGSHLTLVFIGYSSTIFLYVRPGKAHSVQVRKVVALVTSVLTPFLNPFILTFCNQTVKTVLQGQMQRLKGLCKAQ

SEQ ID NO: 357 - DNA, 933 bp, Homo sapiens
  CDS (1)..(933)
atgatggacaaccactctagtgccactgaattccaccttctaggcttccctgggtcccaaggactacaccacattctttttgctatattctttttcttctatttagtgacattaatgggaaacacggtcatcattgtgattgtctgtgtggataaacgtctgcagtcccccatgtatttcttcctcagccacctctctaccctggagatcctggtcacaaccataattgtccccatgatgctttggggattgctcttcctgggatgcagacagtatctttctctacatgtatcgctcaacttttcctgtgggaccatggagtttgcattacttggagtgatggctgtggaccgttatgtggctgtgtgtaaccctttgaggtacaacatcattatgaacagcagtacctgtatttgggtggtaatagtgtcatgggtgtttggatttctttctgaaatctggcccatctatgccacatttcagtttaccttccgcaaatcaaattcattagaccatttttactgtgaccgagggcaattgctcaaactgtcctgcgataacactcttctcacagagtttatccttttcttaatggctgtttttattctcattggttctttgatccctacgattgtctcctacacctacattatctccaccatcctcaagatcccgtcagcctctggccggaggaaagccttctccacttttgcctcccacttcacctgtgttgtgattggctatggcagctgcttgtttctctacgtgaaacccaagcaaacacagggagttgagtacaataagatagtttccctgttggtttctgtgttaacccccttcctgaatcctttcatctttactcttcggaatgacaaagtcaaagaggccctccgagatgggatgaaacgctgctgtcaactcctgaaagattag

SEQ ID NO: 358 - protein, 310 aa, Homo sapiens
MMDNHSSATEFHLLGFPGSQGLHHILFAIFFFFYLVTLMGNTVIIVIVCVDKRLQSPMYFFLSHLSTLEILVTTIIVPMMLWGLLFLGCRQYLSLHVSLNFSCGTMEFALLGVMAVDRYVAVCNPLRYNIIMNSSTCIWVVIVSWVFGFLSEIWPIYATFQFTFRKSNSLDHFYCDRGQLLKLSCDNTLLTEFILFLMAVFILIGSLIPTIVSYTYIISTILKIPSASGRRKAFSTFASHFTCVVIGYGSCLFLYVKPKQTQGVEYNKIVSLLVSVLTPFLNPFIFTLRNDKVKEALRDGMKRCCQLLKD

SEQ ID NO: 359 - DNA, 669 bp, Homo sapiens
  CDS (1)..(669)
atgctgctgggcaacctggccatcatcagcttcatttgccttgattcccgccttcactcacccatgtacttcttcctctgcaacttctccctcatggagatggtggtcacctccactgtggtacataggatgctggcagacctgctatccactcacaagaccatgtccctggccaaatgcctaacccagtctttcttttacttctccctgggctctgccaacttcctgatactcatggtcatggcctttgatcgctacgtggccatctgccaccccctgcgctacccaaccatcacgaatggtccagtgtgtgtgaagctggtggtggcctgttgggtggttggtttcctctccattgtctctcccacactgcagaaaacacgactctggttctgtggccctaacatcatcggccactacttctgtgactctgccccgctgctcaagcttgcctgctctgacacccgccacattgagcgcatggacctcttcctgtccctgctctttgtgctgaccaccatgctgcttatcatcctctcctacatcctcattgtggctgcagtgctgcacatcccttcctcctctggatgccagaaggccttctccacctgtgcctctcacctcacagtggtggttctgggctatgcagtgccatcttcatctacgtga

SEQ ID NO: 360 - protein, 222 aa, Homo sapiens
MLLGNLAIISFICLDSRLHSPMYFFLCNFSLMEMVVTSTVVHRMLADLLSTHKTMSLAKCLTQSFFYFSLGSANFLILMVMAFDRYVAICHPLRYPTITNGPVCVKLVVACWVVGFLSIVSPTLQKTRLWFCGPNIIGHYFCDSAPLLKLACSDTRHIERMDLFLSLLFVLTTMLLIILSYILIVAAVLHIPSSSGCQKAFSTCASHLTVVVLGYAVPSSST

SEQ ID NO: 361 - DNA, 987 bp, Homo sapiens
  CDS (1)..(987)
atgtttctgacagagagaaatacgacatctgaggccacattcactctcttgggcttctcagattacctggaactgcaaattcccctcttctttgtatttctggcagtctacggcttcagtgtggtagggaatcttgggatgatagtgatcatcaaaattaacccaaaattgcatacccccatgtattttttcctcaaccacctctcctttgtggatttctgctattcctccatcattgctcccatgatgctggtgaacctggttgtagaagatagaaccatttcattctcaggatgtttggtgcaattctttttcttttgcacctttgtagtgactgaattaattctatttgcggtgatggcctatgaccactttgtggccatttgcaatcctctgctctacacagttgccatctcccagaaactctgtgccatgctggtggttgtattgtatgcatggggagtcgcatgttccctgacactcgcgtgctctgctttaaagttatcttttcatggtttcaacacaatcaatcatttcttctgtgagttatcctccctgatatcactctcttaccctgactcttatctcagccagttgcttcttttcactgttgccacttttaatgagataagcacactactcatcattctgacatcttatgcattcatcattgtcaccaccttgaagatgccttcagccagtgggcaccgcaaagtcttctccacctgtgcctcccacctgactgccatcaccatcttccatggcaccatcctcttcctctactgtgtacccaactccaaaaactccaggcacacagtcaaagtggcctctgtgttttacaccgtggtgatccccttgttgaatcccctgatctacagtctgagaaataaagatgttaaggatgcaatccgaaaaataatcaatacaaaatattttcatattaaacataggcattggtatccatttaattttgttattgaacaataa

SEQ ID NO: 362 - protein, 328 aa, Homo sapiens
MFLTERNTTSEATFTLLGFSDYLELQIPLFFVFLAVYGFSVVGNLGMIVIIKINPKLHTPMYFFLNHLSFVDFCYSSIIAPMMLVNLVVEDRTISFSGCLVQFFFFCTFVVTELILFAVMAYDHFVAICNPLLYTVAISQKLCAMLVVVLYAWGVACSLTLACSALKLSFHGFNTINHFFCELSSLISLSYPDSYLSQLLLFTVATFNEISTLLIILTSYAFIIVTTLKMPSASGHRKVFSTCASHLTAITIFHGTILFLYCVPNSKNSRHTVKVASVFYTVVIPLLNPLIYSLRNKDVKDAIRKIINTKYFHIKHRHWYPFNFVIEQ

SEQ ID NO: 363 - DNA, 936 bp, Homo sapiens
  CDS (1)..(936)
atgggcaaggaaaactgcaccactgtggctgagttcattctccttggactatcagatgtccctgagttgagagtctgcctcttcctgctgttccttctcatctatggagtcacgttgttagccaatctgggcatgactgcactgattcaggtcagctctcggctccacacccccgtgtactttttcctcagccacttgtcctttgtagatttctgctactcctcaataattgtgccaaagatgttggctaatatctttaacaaggacaaagccatctccttcctagggtgcatggtgcaattctacttgttttgcacatgtggagtcactgaggtcttcctgctggccgtgatggcctatgaccgctttgtggccatctgtaaccccctgctgtacatggtgaccatgtctcaaaagctgcgtgtggagctgacctcttgctgctacttctgtgggacggtgtgttctctgattcactcgtccttagctcttaggatcctcttctatagatctaatgtgattaaccacttcttctgtgatctaccccctctcctaagtcttgcttgctctgatgtcactgtgaatgagacactgctgttcctggtggccactttgaatgagagtgttaccatcatgatcatcctcacctcctacctgctaattctcaccactatcctgaagatacactctgcagagagcaggcacaaagctttctccacctgtgcctcccacctcacagccatcactgtctcccatggaacaatcctttacatttattgcaggccgagttcaggcaacagtggagatgttgacaaagtggccaccgtgttctacacagttgtgattcccatgctgaaccccctgatctacagcctgagaaataaggatgtgaacaaagctctcagaaaagtgatgggctccaaaattcactcctag

SEQ ID NO: 364 - protein, 311 aa, Homo sapiens
MGKENCTTVAEFILLGLSDVPELRVCLFLLFLLIYGVTLLANLGMTALIQVSSRLHTPVYFFLSHLSFVDFCYSSIIVPKMLANIFNKDKAISFLGCMVQFYLFCTCGVTEVFLLAVMAYDRFVAICNPLLYMVTMSQKLRVELTSCCYFCGTVCSLIHSSLALRILFYRSNVINHFFCDLPPLLSLACSDVTVNETLLFLVATLNESVTIMIILTSYLLILTTILKIHSAESRHKAFSTCASHLTAITVSHGTILYIYCRPSSGNSGDVDKVATVFYTVVIPMLNPLIYSLRNKDVNKALRKVMGSKIHS

SEQ ID NO: 365 - DNA, 933 bp, Homo sapiens
  CDS (1)..(933)
atggataaagaaaacagctcaatggtgactgagtttatcttcatgggcatcacccaggaccctcagatggagatcatcttcttcgtggtcttcctcatagtttacctggttaatgtagtggggaatattggtatgattatcctgattacaacagacactcagcttcacacacccatgtattttttcctctgcaacctctcctttgttgacctgggctactcctcagccattgcccccaggatgctggctgacttcctaacaaatcacaaagttatctccttctccagctgtgccacccagtttgctttttttgtaggttttgtggatgctgagtgctatgtcctggcagccatggcctatggtcgttttgtggccatttgtcgacccctccactatagcaccttcatgtccaagcaggtctgcttggctctcatgctgggctcttacctggctggtctagtgagtttagtagcccacactaccctcaccttcagcctgagttactgtggttccaatatcatcaatcatttcttctgcgaaatcccaccactcttggccctctcttgctcagacacctacatcagtgagatcttgctcttcagtctgtgtggcttcattgaattcagcaccatcctcatcatcttcatctcctatacctttatccttgttgcaatcatcagaatgcgttcagctgaaggccgccttaaggctttctccacctgcgggtctcaccttactggcatcaccctcttctatggcacagtcatgtttatgtacctgaggccaacatccagctactccctggaccaagacaagtgggcctctgtgttctacacggttatcatccccatgttaaatcccttgatctacagtttgcggaacaaggatgtgaaagctgctttcaaaaagctaattggaaaaaaatctcaataa

SEQ ID NO: 366 - protein, 310 aa, Homo sapiens
MDKENSSMVTEFIFMGITQDPQMEIIFFVVFLIVYLVNVVGNIGMIILITTDTQLHTPMYFFLCNLSFVDLGYSSAIAPRMLADFLTNHKVISFSSCATQFAFFVGFVDAECYVLAAMAYGRFVAICRPLHYSTFMSKQVCLALMLGSYLAGLVSLVAHTTLTFSLSYCGSNIINHFFCEIPPLLALSCSDTYISEILLFSLCGFIEFSTILIIFISYTFILVAIIRMRSAEGRLKAFSTCGSHLTGITLFYGTVMFMYLRPTSSYSLDQDKWASVFYTVIIPMLNPLIYSLRNKDVKAAFKKLIGKKSQ

SEQ ID NO: 367 - DNA, 948 bp, Homo sapiens
  CDS (1)..(948)
atgttctccccaaaccacaccatagtgacagaattcattctcttgggactgacagacgacccagtgctagagaagatcctgtttggggtattccttgcgatctacctaatcacactggcaggcaacctgtgcatgatcctgctgatcaggaccaattcccacctgcaaacacccatgtatttcttccttggccacctctcctttgtagacatttgctattcttccaatgttactccaaatatgctgcacaatttcctctcagaacagaagaccatctcctacgctggatgcttcacacagtgtcttctcttcatcgccctggtgatcactgagttttacatccttgcttcaatggcattggatcgctatgtagccatttgcagccctttgcattacagttccaggatgtccaagaacatctgtgtctgtctggtcactatcccttacatgtatgggtttcttagtgggttctctcagtcactgctaacctttcacttatccttctgtggctcccttgaaatcaatcatttctactgcgctgatcctcctcttatcatgctggcctgctctgacacccgtgtcaaaaagatggcaatgtttgtagttgcaggctttaatctctcaagctctctcttcatcattcttctgtcctatcttttcatttttgcagcgatcttcaggatccgttctgctgaaggcaggcacaaagccttttctacgtgtgcttcccacctgacaatagtcactttgttttatggaaccctcttctgcatgtacgtaaggcctccatcagagaagtctgtagaggagtccaaaataactgcagtcttttatacttttttgagcccaatgctgaacccattgatctatagcctacggaacacagatgtaatccttgccatgcaacaaatgattaggggaaaatcctttcataaaattgcagtttag

SEQ ID NO: 368 - protein, 315 aa, Homo sapiens
MFSPNHTIVTEFILLGLTDDPVLEKILFGVFLAIYLITLAGNLCMILLIRTNSHLQTPMYFFLGHLSFVDICYSSNVTPNMLHNFLSEQKTISYAGCFTQCLLFIALVITEFYILASMALDRYVAICSPLHYSSRMSKNICVCLVTIPYMYGFLSGFSQSLLTFHLSFCGSLEINHFYCADPPLIMLACSDTRVKKMAMFVVAGFNLSSSLFIILLSYLFIFAAIFRIRSAEGRHKAFSTCASHLTIVTLFYGTLFCMYVRPPSEKSVEESKITAVFYTFLSPMLNPLIYSLRNTDVILAMQQMIRGKSFHKIAV

SEQ ID NO: 369 - DNA, 918 bp, Homo sapiens
  CDS (1)..(918)
atgcagaggagcaatcacacagtgactgagtttatactgctgggcttcaccacagacccagggatgcagctgggcctcttcgtggtgttcctgggcgtgtactctctcactgtggtaggaaatagcaccctcatcgtgttgatctgtaatgactcccacctccacacacccatgtattttgtcgttggaaatctgtcgtttctggatctctggtattcttctgtctacaccccaaagatcctagtgatctgcatctctgaagacaaaagcatctcctttgctggctgcctgtgtcagttcttcttctctgcagggctggcctatagtgagtgctgcttactggctgccatggcttatgaccgctacgtggccatctccaagcccctgctttatgcccaggccatgtccataaagctgtgtgcattgctggtagcagtctcatattgtggtggctttattaactcttcaatcatcaccaagaaaacgttttcctttaacttctgccgtgaaaacatcattgatgactttttctgtgatttgcttcccttggtggagctggcctgtggcgagaagggcggctataaaattatgatgtacttcctgctggcctccaatgtcatctgccccgcagtgctcatcctggcctcctacctctttatcatcaccagtgtcttgaggatctcctcctccaagggctacctcaaagccttctccacatgctcctcccacctgacctctgtcactttatactatggctccattctctacatctacgctctccccagatctagctattcttttgatatggacaaaatagtttctacattttacactgtggtattccccatgttgaatctcatgatctacagcctaaggaataaggatgtgaaagaggctctgaaaaaacttctcccataa

SEQ ID NO: 370 - protein, 305 aa, Homo sapiens
MQRSNHTVTEFILLGFTTDPGMQLGLFVVFLGVYSLTVVGNSTLIVLICNDSHLHTPMYFVVGNLSFLDLWYSSVYTPKILVICISEDKSISFAGCLCQFFFSAGLAYSECCLLAAMAYDRYVAISKPLLYAQAMSIKLCALLVAVSYCGGFINSSIITKKTFSFNFCRENIIDDFFCDLLPLVELACGEKGGYKIMMYFLLASNVICPAVLILASYLFIITSVLRISSSKGYLKAFSTCSSHLTSVTLYYGSILYIYALPRSSYSFDMDKIVSTFYTVVFPMLNLMIYSLRNKDVKEALKKLLP

SEQ ID NO: 371 - DNA, 954 bp, Homo sapiens
  CDS (1)..(954)
atgatgagacttatgaaagaggttcgaggcagaaatcaaacagaagtaacagaatttctcctcttaggactttccgacaatccagatctacaaggagtcctctttgcattgtttctgttgatctatatggcaaacatggtgggcaatttggggatgattgtattgattaagattgatctctgtctccacacccccatgtatttctttctcagtagcctctcttttgtagatgcctcttactcttcttccgtcactcccaagatgctggtgaacctcatggctgagaataaggccatttcttttcatggatgtgctgcccagttctacttctttggctccttcctggggactgagtgcttcctgttggccatgatggcatatgaccgctatgcagccatttggaaccccctgctctacccagttctcgtgtctgggagaatttgctttttgctaatagctacctccttcttagcaggttgtggaaatgcagccatacatacagggatgacttttaggttgtccttttgtggttctaataggatcaaccatttctactgtgacaccccgccactgctcaaactctcttgctctgatacccacttcaatggcattgtgatcatggcattctcaagttttattgtcatcagctgtgttatgattgtcctcatttcctacctgtgtatcttcattgccgtcttgaagatgccttcgttagagggcaggcacaaagccttctccacctgtgcctcttacctcatggctgtcaccatattctttggaacaatcctcttcatgtacttgcgccctacatctagctactcaatggagcaagacaaggttgtctctgtcttttatacagtaataatccctgtgctaaatcccctcatctatagtttaaaaaataaggatgtaaaaaaggccctaaagaagatcttatggaaacacatcttgtag

SEQ ID NO: 372 - protein, 317 aa, Homo sapiens
MMRLMKEVRGRNQTEVTEFLLLGLSDNPDLQGVLFALFLLIYMANMVGNLGMIVLIKIDLCLHTPMYFFLSSLSFVDASYSSSVTPKMLVNLMAENKAISFHGCAAQFYFFGSFLGTECFLLAMMAYDRYAAIWNPLLYPVLVSGRICFLLIATSFLAGCGNAAIHTGMTFRLSFCGSNRINHFYCDTPPLLKLSCSDTHFNGIVIMAFSSFIVISCVMIVLISYLCIFIAVLKMPSLEGRHKAFSTCASYLMAVTIFFGTILFMYLRPTSSYSMEQDKVVSVFYTVIIPVLNPLIYSLKNKDVKKALKKILWKHIL

SEQ ID NO: 373 - DNA, 939 bp, Homo sapiens
  CDS (1)..(939)
atgaatggaatgaatcactctgtggtatcagaatttgtattcatgggactcaccaactcacgggagattcagcttctactttttgttttctctttgttgttctactttgcgagcatgatgggaaaccttgtcattgtattcactgtaaccatggatgctcatctgcactcccccatgtatttcctcctggctaacctctcaatcattgatatggcattttgctcaattacagcccctaagatgatttgtgatattttcaagaagcacaaggccatctcctttcggggatgtattactcagatcttctttagccatgctcttgggggcactgagatggtgctgctcatagccatggcctttgacagatacatggccatatgtaaacctctccactacctgaccatcatgagcccaagaatgtgtctatactttttagccacttcctctatcattggccttatccactcattggtccaattagtttttgtggtagatttacctttttgtggtcctaatatctttgacagtttttactgtgatctccctcggctcctcagacttgcctgtaccaacacccaagaactggagttcatggtcactgtcaatagtggactcatttctgtgggctcctttgtcttgctggtaatttcctacatcttcattctgttcactgtttggaaacattcttctggtggtctagccaaggccctctctaccctgtcagctcatgtcactgtggtcatcttgttctttgggccactgatgtttttctacacatggccttctcccacatcacacctggataaatatcttgctatttttgatgcatttattactccttttctgaatccagttatctacacattcaggaacaaagacatgaaagtggcaatgaggagactgtgcagtcgtcttgcgcattttacaaagattttgtaa

SEQ ID NO: 374 - protein, 312 aa, Homo sapiens
MNGMNHSVVSEFVFMGLTNSREIQLLLFVFSLLFYFASMMGNLVIVFTVTMDAHLHSPMYFLLANLSIIDMAFCSITAPKMICDIFKKHKAISFRGCITQIFFSHALGGTEMVLLIAMAFDRYMAICKPLHYLTIMSPRMCLYFLATSSIIGLIHSLVQLVFVVDLPFCGPNIFDSFYCDLPRLLRLACTNTQELEFMVTVNSGLISVGSFVLLVISYIFILFTVWKHSSGGLAKALSTLSAHVTVVILFFGPLMFFYTWPSPTSHLDKYLAIFDAFITPFLNPVIYTFRNKDMKVAMRRLCSRLAHFTKIL

SEQ ID NO: 375 - DNA, 876 bp, Homo sapiens
  CDS (1)..(876)
atggttggggcaaatcactccgtggtgtcagagtttgtgttcctgggactcaccaattcctgggagatccgacttctcctccttgtgttctcctccatgttttacatggccagtatgatgggaaactctctcattttgctcactgtgacttctgaccctcacttgcactcccccatgtattttctgttagccaacctctccttcattgacctgggtgtttcctctgtcacttctcccaaaatgatttatgacctgttcagaaagcacgaagtcatctcctttggaggctgcatcgctcaaatcttcttcatccacgtcattggcggtgtggagatggtgctgctcatagccatggcctttgacagatatgtggccatatgtaagcccctccagtacctgaccattatgagcccaagaatgtgcatgttcttcttagtggctgcctgggtgaccggccttatccactctgtagttcaattggtttttgtagtaaacttgcccttctgtggtcctaatgtatcggacagcttttactgtgaccttcctcggttcatcaaacttgcctgcacagacagctaccgactggagttcatggttacagccaacagtggattcatctctctgggctccttcttcatactgatcatttcctatgtggtcatcattctcactgttctgaaacactcttcagctggtttatccaaggctctgtccaccctttcagctcacgtcagtgtggtagttttgttctttggtcctttgatttttgtctatacgtggccatctccctccacacacctggataagtttctggccatctttgatgcagttctcactcctgttttaaatcctatcatctacacattcaggaattga

SEQ ID NO: 376 - protein, 291 aa, Homo sapiens
MVGANHSVVSEFVFLGLTNSWEIRLLLLVFSSMFYMASMMGNSLILLTVTSDPHLHSPMYFLLANLSFIDLGVSSVTSPKMIYDLFRKHEVISFGGCIAQIFFIHVIGGVEMVLLIAMAFDRYVAICKPLQYLTIMSPRMCMFFLVAAWVTGLIHSVVQLVFVVNLPFCGPNVSDSFYCDLPRFIKLACTDSYRLEFMVTANSGFISLGSFFILIISYVVIILTVLKHSSAGLSKALSTLSAHVSVVVLFFGPLIFVYTWPSPSTHLDKFLAIFDAVLTPVLNPIIYTFRN

SEQ ID NO: 377 - DNA, 1239 bp, Homo sapiens
  CDS (1)..(1239)
atgaatgagaacatgcagtgttttgttttctgttcttgtgatagtttgctgagaatgatggtttcccgcttcatccatgtcccatttgtaaaaatgaaaaggataattgtgggaggatattctaaacacttcttttctaatgagctgctctgtgtgaggccctggtcagggaaaacgtggtcgataaggcatcacatttttgacatggagcttctgacaaataatctcaaatttatcactgacccttttgtttgtaggctccgacacctgagtccaacaccttcagaagaacacatgaaaaataagaacaatgtgactgaatttatcctcttagggctcacacagaaccctgaggggcaaaaggttttatttgtcacattcttactaatctacatggtgacgataatgggcaacctgcttatcatagtgaccatcatggccagccagtccctgggttcccccatgtacttttttctggcttctttatcattcatagataccgtctattctactgcatttgctcccaaaatgattgttgacttgctctctgagaaaaagaccatttcctttcagggttgtatggctcaactttttatggatcatttatttgctggtgctgaagtcattcttctggtggtaatggcctatgatcgatacatggccatctgtaagcctcttcatgaattgatcaccatgaatcgtcgagtctgtgttcttatgctgttggcggcctggattggaggctttcttcactcattggttcaatttctctttatttatcagctccctttctgtggacccaatgtcattgacaacttcctgtgtgatttgtatcccttattgaaacttgcttgcaccaatacctatgtcactgggctttctatgatagctaatggaggagcgatttgtgctgtcaccttcttcactatcctgctttcctatggggtcatattacactctcttaagactcagagtttggaagggaaacgaaaagctttctacacctgtgcatcccacgtcactgtggtcattttattctttgtcccctgtatcttcttgtatgcaaggcccaattctacttttcccattgataaatccatgactgtagttctaacttttataactcccatgctgaacccactaatctataccctgaagaatgcagaaatgaaaagtgccatgaggaaactttggagtaaaaaagtaagcttagctgggaaatggctgtatcactcatga

SEQ ID NO: 378 - protein, 412 aa, Homo sapiens
MNENMQCFVFCSCDSLLRMMVSRFIHVPFVKMKRIIVGGYSKHFFSNELLCVRPWSGKTWSIRHHIFDMELLTNNLKFITDPFVCRLRHLSPTPSEEHMKNKNNVTEFILLGLTQNPEGQKVLFVTFLLIYMVTIMGNLLIIVTIMASQSLGSPMYFFLASLSFIDTVYSTAFAPKMIVDLLSEKKTISFQGCMAQLFMDHLFAGAEVILLVVMAYDRYMAICKPLHELITMNRRVCVLMLLAAWIGGFLHSLVQFLFIYQLPFCGPNVIDNFLCDLYPLLKLACTNTYVTGLSMIANGGAICAVTFFTILLSYGVILHSLKTQSLEGKRKAFYTCASHVTVVILFFVPCIFLYARPNSTFPIDKSMTVVLTFITPMLNPLIYTLKNAEMKSAMRKLWSKKVSLAGKWLYHS

SEQ ID NO: 379 - DNA, 948 bp, Homo sapiens
  CDS (1)..(948)
atgtccataaccaaagcctggaacagctcatcagtgaccatgttcatcctcctgggattcacagaccatccagaactccaggccctcctctttgtgaccttcctgggcatctatcttaccaccctggcctggaacctggccctcatttttctgatcagaggtgacacccatctgcacacacccatgtacttcttcctaagcaacttatctttcattgacatctgctactcttctgctgtggctcccaatatgctcactgacttcttctgggagcagaagaccatatcatttgtgggctgtgctgctcagttttttttctttgtcggcatgggtctgtctgagtgcctcctcctgactgctatggcatacgaccgatatgcagccatctccagcccccttctctaccccactatcatgacccagggcctctgtacacgcatggtggttggggcatatgttggtggcttcctgagctccctgatccaggccagctccatatttaggcttcacttttgcggacccaacatcatcaaccacttcttctgcgacctcccaccagtcctggctctgtcttgctctgacaccttcctcagtcaagtggtgaatttcctcgtggtggtcactgtcggaggaacatcgttcctccaactccttatctcctatggttacatagtgtctgcggtcctgaagatcccttcagcagagggccgatggaaagcctgcaacacgtgtgcctcgcatctgatggtggtgactctgctgtttgggacagcccttttcgtgtacttgcgacccagctccagctacttgctaggcagggacaaggtggtgtctgttttctattcattggtgatccccatgctgaaccctctcatttacagtttgaggaacaaagagatcaaggatgccctgtggaaggtgttggaaaggaagaaagtgttttcttag

SEQ ID NO: 380 - protein, 315 aa, Homo sapiens
MSITKAWNSSSVTMFILLGFTDHPELQALLFVTFLGIYLTTLAWNLALIFLIRGDTHLHTPMYFFLSNLSFIDICYSSAVAPNMLTDFFWEQKTISFVGCAAQFFFFVGMGLSECLLLTAMAYDRYAAISSPLLYPTIMTQGLCTRMVVGAYVGGFLSSLIQASSIFRLHFCGPNIINHFFCDLPPVLALSCSDTFLSQVVNFLVVVTVGGTSFLQLLISYGYIVSAVLKIPSAEGRWKACNTCASHLMVVTLLFGTALFVYLRPSSSYLLGRDKVVSVFYSLVIPMLNPLIYSLRNKEIKDALWKVLERKKVFS

SEQ ID NO: 381 - DNA, 945 bp, Homo sapiens
  CDS (1)..(945)
atggatcagagaaattacaccagagtgaaagaatttaccttcctgggaattactcagtcccgagaactgagccaggtcttatttaccttcctgtttttggtgtacatgacaactctaatgggaaacttcctcatcatggttacagttacctgtgaatctcaccttcatacgcccatgtacttcctgctccgcaacctgtctattcttgacatctgcttttcctccatcacagctcctaaggtcctgatagatcttctatcagagacaaaaaccatctccttcagtggctgtgtcactcaaatgttcttcttccaccttctggggggagcagacgttttttctctctctgtgatggcgtttgaccgctatatagccatctccaagcccctgcactatatgaccatcatgagtagggggcgatgcacaggcctcatcgtgggcttcctgggtggggggcttgtccactccatagcgcagatttctctattgctcccactccctgtctgtggacccaatgttcttgacactttctactgcgatgtcccccaggtcctcaaacttgcctgcactgacaccttcactctggagctcctgatgatttcaaataatgggttagtcagttggtttgtattcttctttctcctcatatcttacacggtcatcttgatgatgctgaggtctcacactggggaaggcaggaggaaagccatctccacctgcacctcccacatcaccgtggtgaccctgcatttcgtgccctgcatctatgtctatgcccggcccttcactgccctccccacagacactgccatctctgtcaccttcactgtcatctcccctttgctcaatcctataatttacacgctgaggaatcaggaaatgaagttggccatgaggaaactgaagagacggctaggacaatcagaaaggattttaattcaataa

SEQ ID NO: 382 - protein, 314 aa, Homo sapiens [sequence omitted]

SEQ ID NO: 383 - DNA, 936 bp, Homo sapiens
  CDS (1)..(936)
atggagatggaaaactgcaccagggtaaaagaatttattttccttggcctgacccagaatcgggaagtgagcttagtcttatttcttttcctactcttggtgtatgtgacaactttgctgggaaacctcctcatcatggtcactgttacctgtgaatctcgccttcacacgcccatgtattttttgctccataatttatctattgccgatatctgcttctcttccatcacagtgcccaaggttctggtggaccttctgtctgaaagaaagaccatctccttcaatcattgcttcactcagatgtttctattccaccttattggaggggtggatgtattttctctttcggtgatggcattggatcgatatgtggccatctccaagcccctgcactatgcgactatcatgagtagagaccattgcattgggctcacagtggctgcctggttggggggctttgtccactccatcgtgcagatttccctgttgctcccactccctttctgcggacccaatgttcttgacactttctactgtgatgtccaccgggtcctcaaactggcccatacagacattttcatacttgaactactaatgatttccaacaatggactgctcaccacactgtggtttttcctgctcctggtgtcctacatagtcatattatcattacccaagtctcaggcaggagagggcaggaggaaagccatctccacctgcacctcccacatcactgtggtgaccctgcatttcgtgccctgcatctatgtctatgcccggcccttcactgccctccccatggataaggccatctctgtcaccttcactgtcatctcccctctgctcaaccccttgatctacactctgaggaaccatgagatgaagtcagccatgaggagactgaagagaagacttgtgccttctgatagaaaatag

SEQ ID NO: 384 - protein, 311 aa, Homo sapiens
MEMENCTRVKEFIFLGLTQNREVSLVLFLFLLLVYVTTLLGNLLIMVTVTCESRLHTPMYFLLHNLSIADICFSSITVPKVLVDLLSERKTISFNHCFTQMFLFHLIGGVDVFSLSVMALDRYVAISKPLHYATIMSRDHCIGLTVAAWLGGFVHSIVQISLLLPLPFCGPNVLDTFYCDVHRVLKLAHTDIFILELLMISNNGLLTTLWFFLLLVSYIVILSLPKSQAGEGRRKAISTCTSHITVVTLHFVPCIYVYARPFTALPMDKAISVTFTVISPLLNPLIYTLRNHEMKSAMRRLKRRLVPSDRK

SEQ ID NO: 385 - DNA, 1008 bp, Homo sapiens
  CDS (1)..(1008)
atggcacaggtgagggcgctgcataaaatcatggcccttttttctgctaacagcataggtgctatgaacaactctgacactcgcatagcaggctgcttcctcactggcatccctgggctggagcaactacatatctggctgtccatccccttctgcatcatgtacatcgctgccctggaaggcaatggcatcctaatttgtgtcatcctctcccaggcaatcctgcatgagcccatgtacatattcttatctatgctggccagtgctgatgtcttgctctctaccaccaccatgcctaaggccctggccaatttgtggctaggttatagccacatttcctttgatggctgcctcactcaaaagttcttcattcacttcctcttcattcactctgctgtcctgctggccatggcctttgaccgctatgtggccatctgctcccccctgcgatatgtcacaatcctcacaagcaaggtcattgggaagatcgtcactgccaccctgagccgcagcttcatcattatgtttccatccatctttctccttgagcacctgcactattgccagatcaacatcattgcacacacattttgtgagcacatgggcattgcccatctgtcctgttctgatatctccatcaatgtctggtatgggttggcagctgctcttctctccacaggcctggacatcatgcttattactgtttcctacatccacatcctccaagcagtcttccgcctcctttctcaagatgcccgctccaaggccctgagtacctgtggatcccatatctgtgtcatcctactcttctatgtccctgcccttttttctgtctttgcctacaggtttggtgggagaagcatcccatgctatgtccatattctcctggccagcctctacgttgtcattcctcctatgctcaatcccgttatttatggagtgaggactaagccaatactggaaggggctaagcagatgttttcaaatcttgccaaaggatctaaataa

SEQ ID NO: 386 - protein, 335 aa, Homo sapiens
MAQVRALHKIMALFSANSIGAMNNSDTRIAGCFLTGIPGLEQLHIWLSIPFCIMYIAALEGNGILICVILSQAILHEPMYIFLSMLASADVLLSTTTMPKALANLWLGYSHISFDGCLTQKFFIHFLFIHSAVLLAMAFDRYVAICSPLRYVTILTSKVIGKIVTATLSRSFIIMFPSIFLLEHLHYCQINIIAHTFCEHMGIAHLSCSDISINVWYGLAAALLSTGLDIMLITVSYIHILQAVFRLLSQDARSKALSTCGSHICVILLFYVPALFSVFAYRFGGRSIPCYVHILLASLYVVIPPMLNPVIYGVRTKPILEGAKQMFSNLAKGSK

SEQ ID NO: 387 - DNA, 912 bp, Homo sapiens
  CDS (1)..(912)
atgagcttctcttccctgcctactgaaatacagtcattactctttctgacatttctaaccatctacctggtcaccctgatgggaaactgcctcatcattctggttaccctagctgaccccatgctacacagccccatgtacttcttcctcagaaacttatctttcctggagattggcttcaacctagtcattgtgcccaaaatgctggggaccctgcttgcccaggacacaaccatctccttccttggctgtgccactcagatgtatttcttcttcttctttggagtggctgaatgcttcctcctggctaccatggcatatgaccgctatgtggccatctgcagtcccttgcactacccagtcatcatgaaccaaaggactcgtgccaaactggctgctgcctcctggttcccaggctttcctgtagctactgtgcagaccacatggctcttcagttttccattctgtggcaccaacaaggtgaaccacttcttctgtgacagcccacctgtgctgaggctggtctgtgcagacacagcactctttgagatctacgccatcgtcggaaccattctggtggtcatgatcccctgcttgctgatcttgtgttcctatactcacattgctgctgccatcctcaagatcccatcagctaaagggaagaataaagccttttctacatgttcctcacacctccttgttgtctctcttttctatatatcattaagcctcacctacttccggcctaaatcaaataattcacctgagggcaagaagctgctatcattgtcctacactgttatgactcccatgttgaaccccattatctacagcctgagaaataacgaggtgaagaatgccctcagcaggacggtctctaaggccctagccctcagaaactgtatcccatag

SEQ ID NO: 388 - protein, 303 aa, Homo sapiens
MSFSSLPTEIQSLLFLTFLTIYLVTLMGNCLIILVTLADPMLHSPMYFFLRNLSFLEIGFNLVIVPKMLGTLLAQDTTISFLGCATQMYFFFFFGVAECFLLATMAYDRYVAICSPLHYPVIMNQRTRAKLAAASWFPGFPVATVQTTWLFSFPFCGTNKVNHFFCDSPPVLRLVCADTALFEIYAIVGTILVVMIPCLLILCSYTHIAAAILKIPSAKGKNKAFSTCSSHLLVVSLFYISLSLTYFRPKSNNSPEGKKLLSLSYTVMTPMLNPIIYSLRNNEVKNALSRTVSKALALRNCIP

SEQ ID NO: 389 - DNA, 945 bp, Homo sapiens
  CDS (1)..(945)
atgaaaagacaaaatcaaagctgtgtggttgaattcatcctcctgggcttttctaactttcctgagctccaggtgcagctctttggggttttcctagttatttatgtggtgaccctgatgggaaatgccatcattacagtcatcatctccttaaaccagagcctccacgttcccatgtacctgttcctcctgaacctatctgtggtggaggtgagtttcagtgcagtcattacgcctgaaatgctggtggtgctctctactgagaaaactatgatttcttttgtgggctgttttgcacagatgtatttcatccttctttttggtgggactgaatgttttctcctgggagcgatggcttatgaccgatttgctgcaatttgccatcctctgaactacccagtgattatgaacagaggggtttttatgaaattagtaatattctcatggatctcagggatcatggtggctactgtgcagaccacttgggtatttagttttccattttgtggccccaatgaaattaatcatctcttctgtgagactcccccggtactagagcttgtgtgtgcagacaccttcttatttgaaatctatgccttcacaggcaccattttgattgttatggttcctttcttgttgatcctcttgtcttacattcgagttctgtttgccatcctgaagatgccatcaactactgggagacaaaaggccttttccacctgtgcctctcacctcacatctgtgaccctgttctatggcacagccaatatgacttatttacaacccaaatctggctactcacccgaaaccaagaaactgatctcattggcttacacgttgcttacccctctgctcaatccgctcatctatagcttacgaaacagtgagatgaagaggactttgataaaactatggcgaagaaaagtgattttacacacattctga

SEQ ID NO: 390 - protein, 314 aa, Homo sapiens
MKRQNQSCVVEFILLGFSNFPELQVQLFGVFLVIYVVTLMGNAIITVIISLNQSLHVPMYLFLLNLSVVEVSFSAVITPEMLVVLSTEKTMISFVGCFAQMYFILLFGGTECFLLGAMAYDRFAAICHPLNYPVIMNRGVFMKLVIFSWISGIMVATVQTTWVFSFPFCGPNEINHLFCETPPVLELVCADTFLFEIYAFTGTILIVMVPFLLILLSYIRVLFAILKMPSTTGRQKAFSTCASHLTSVTLFYGTANMTYLQPKSGYSPETKKLISLAYTLLTPLLNPLIYSLRNSEMKRTLIKLWRRKVILHTF

SEQ ID NO: 391 - DNA, 945 bp, Homo sapiens
  CDS (1)..(945)
atggaaagacaaaatcaaagctgtgtggttgaattcatcctcttgggcttttctaactatcctgagctccaggggcagctctttgtggctttcctggttatttatctggtgaccctgataggaaatgccattattatagtcatcgtctccctagaccagagcctccacgttcccatgtacctgtttctcctgaacttatctgtggtggacctgagtttcagtgcagttattatgcctgaaatgctggtggtcctctctactgaaaaaactacaatttcttttgggggctgttttgcacagatgtatttcatccttctttttggtggggctgaatgttttcttctgggagcaatggcttatgaccgatttgctgcaatttgccatcctctcaactaccaaatgattatgaataaaggagtttttatgaaattaattatattttcatgggccttaggttttatgttaggtactgttcaaacatcatgggtatctagttttcccttttgtggccttaatgaaattaaccatatatcttgtgaaaccccagcagtgttagaacttgcatgtgcagacacgtttttgtttgaaatctatgcattcacaggcacctttttgattattttggttcctttcttgttgatactcttgtcttacattcgagttctgtttgccatcctgaagatgccatcaaccactgggagacaaaaggccttttccacctgtgccgctcacctcacatctgtgaccctattctatggcacagccagtatgacttatttacaacccaaatctggctactcaccggaaaccaagaaagtgatgtcattgtcttactcacttctgacaccactgctgaatctgcttatctacagtttgcgaaatagtgagatgaagagggctttgatgaaattatggcgaaggcgagtggttttacacacaatctga

SEQ ID NO: 392 - protein, 314 aa, Homo sapiens
MERQNQSCVVEFILLGFSNYPELQGQLFVAFLVIYLVTLIGNAIIIVIVSLDQSLHVPMYLFLLNLSVVDLSFSAVIMPEMLVVLSTEKTTISFGGCFAQMYFILLFGGAECFLLGAMAYDRFAAICHPLNYQMIMNKGVFMKLIIFSWALGFMLGTVQTSWVSSFPFCGLNEINHISCETPAVLELACADTFLFEIYAFTGTFLIILVPFLLILLSYIRVLFAILKMPSTTGRQKAFSTCAAHLTSVTLFYGTASMTYLQPKSGYSPETKKVMSLSYSLLTPLLNLLIYSLRNSEMKRALMKLWRRRVVLHTI

SEQ ID NO: 393 - DNA, 1074 bp, Homo sapiens
  CDS (1)..(1074)
atgaataacactattgtatttgtcataaaaatacaaatagaaaaaagtgacttgaaatatagagccatttcattgcaagaaatctcaaagatttcccttcttttctgggtccttctcttggtcatttctagacttttactagccatgacactaggaaacagcactgaagtcactgaattctatcttctgggatttggtgcccagcatgagttttggtgtatcctcttcattgtattccttctcatctatgtgacctccataatgggtaatagtggaataatcttactcatcaacacagattccagatttcaaacactcacgtacttttttctacaacatttggcttttgttgatatctgttacacttctgctatcactcccaagatgctccaaagcttcacagaagaaaagaatttgatattatttcagggctgtgtgatacaattcttagtttatgcaacatttgcaaccagtgactgttatctcctggctatgatggcagtggatccttatgttgccatctgtaagccccttcactatactgtaatcatgtcccgaacagtctgcatccgtttggtagctggttcatacatcatgggctcaataaatgcctctgtacaaacaggttttacatgttcactgtccttctgcaagtccaatagcatcaatcactttttctgtgatgttccccctattcttgctctttcatgctccaatgttgacatcaacatcatgctacttgttgtctttgtgggatctaacttgatattcactgggttggtcgtcatcttttcctacatctacatcatggccaccatcctgaaaatgtcttctagtgcaggaaggaaaaaatccttctcaacatgtgcttcccacctgaccgcagtcaccattttctatgggacactctcttacatgtatttgcagtctcattctaataattcccaggaaaatatgaaagtggcctttatattttatggcacagttattcccatgttaaatcctttaatctatagcttgagaaataaggaagtaaaagaagctttaaaagtgatagggaaaaagttattttaa

SEQ ID NO: 394 - protein, 357 aa, Homo sapiens [sequence omitted]

SEQ ID NO: 395 - DNA, 933 bp, Homo sapiens
  CDS (1)..(933)
atggcagccaaaaactcttctgtgacagagtttatcctcgaaggcttaacccaccagccgggactgcggatccccctcttcttcctgtttctgggtttctacacggtcaccgtggtggggaacctgggcttgataaccctgattgggctgaactctcacctgcacactcccatgtacttcttcctttttaacctctctttaatagatttctgtttctccactaccatcactcccaaaatgctgatgagttttgtctcaaggaagaacatcatttccttcacagggtgtatgactcagctcttcttcttctgcttctttgtcgtctctgagtccttcatcctgtcagcgatggcgtatgaccgctacgtggccatctgtaacccactgttgtacacagtcaccatgtcttgccaggtgtgtttgctccttttgttgggtgcctatgggatggggtttgctggggccatggcccacacaggaagcataatgaacctgaccttctgtgctgacaaccttgtcaatcatttcatgtgtgacatccttcctctccttgagctctcctgcaacagctcttacatgaatgagctggtggtctttattgtggtggctgttgacgttggaatgcccattgtcactgtctttatttcttatgccctcatcctctccagcattctacacaacagttctacagaaggcaggtccaaagcctttagtacttgcagttcccacataattgtagtttctcttttctttggttctggtgctttcatgtatctcaaacccctttccatcctgcccctcgagcaagggaaagtgtcctccctgttctataccataatagtccccgtgttaaacccattaatctatagcttgaggaacaaggatgtcaaagttgccctgaggagaactttgggcagaaaaatcttttcttaa

SEQ ID NO: 396 - protein, 310 aa, Homo sapiens
MAAKNSSVTEFILEGLTHQPGLRIPLFFLFLGFYTVTVVGNLGLITLIGLNSHLHTPMYFFLFNLSLIDFCFSTTITPKMLMSFVSRKNIISFTGCMTQLFFFCFFVVSESFILSAMAYDRYVAICNPLLYTVTMSCQVCLLLLLGAYGMGFAGAMAHTGSIMNLTFCADNLVNHFMCDILPLLELSCNSSYMNELVVFIVVAVDVGMPIVTVFISYALILSSILHNSSTEGRSKAFSTCSSHIIVVSLFFGSGAFMYLKPLSILPLEQGKVSSLFYTIIVPVLNPLIYSLRNKDVKVALRRTLGRKIFS

SEQ ID NO: 397 - DNA, 942 bp, Homo sapiens
  CDS (1)..(942)
atgacaatggctgctgagaattcctccttcgtgacacagtttatcctcgcaggcttaactgaccaaccgggagtccagatccccctcttcttcctgtttctaggcttctacgtggtcactgtggtggggaacctgggcttgataaccctgataaggctcaactctcacttgcacacccctatgtacttcttcctctataacttgtccttcatagatttctgctattccagtgttatcactcccaaaatgctgatgagctttgtcttaaagaagaacagcatctcctacgcagggtgtatgactcagctcttcttctttcttttctttgttgtctctgagtccttcatcctgtcagcaatggcgtatgaccgctatgtggccatctgtaacccactgttgtacatggtcaccatgtctccccaggtgtgttttctccttttgttgggtgtctatgggatggggtttgctggggccatggcccacacagcgtgcatgatgggtgtgaccttctgtgccaataaccttgtcaaccactacatgtgtgacatccttccccttcttgagtgtgcttgcaccagcacctatgtgaatgagcttgtagtgtttgttgttgtgggcattgatattggtgtgcccacagtcaccatcttcatttcctatgctctcattctctccagcatcttccacattgattccacggagggcaggtccaaagccttcagcacctgcagctcccacataattgcagtttctctgttctttgggtcaggagcattcatgtacctcaaacccttttctcttttagctatgaaccagggcaaggtgtcttccctattctataccactgtggtgcccatgctcaacccattaatttatagcctgaggaataaggacgtcaaagttgctctaaagaaaatcttgaacaaaaatgcattctcctga

SEQ ID NO: 398 - protein, 313 aa, Homo sapiens
MTMAAENSSFVTQFILAGLTDQPGVQIPLFFLFLGFYVVTVVGNLGLITLIRLNSHLHTPMYFFLYNLSFIDFCYSSVITPKMLMSFVLKKNSISYAGCMTQLFFFLFFVVSESFILSAMAYDRYVAICNPLLYMVTMSPQVCFLLLLGVYGMGFAGAMAHTACMMGVTFCANNLVNHYMCDILPLLECACTSTYVNELVVFVVVGIDIGVPTVTIFISYALILSSIFHIDSTEGRSKAFSTCSSHIIAVSLFFGSGAFMYLKPFSLLAMNQGKVSSLFYTTVVPMLNPLIYSLRNKDVKVALKKILNKNAFS

SEQ ID NO: 399 - DNA, 930 bp, Homo sapiens
  CDS (1)..(930)
atgactctgagaaacagctcctcagtgactgagtttatccttgtgggattatcagaacagccagagctccagctccctcttttccttctattcttagggatctatgtgttcactgtggtgggcaacttgggcttgatcaccttaattgggataaatcctagccttcacacccccatgtactttttcctcttcaacttgtcctttatagatctctgttattcctgtgtgtttacccccaaaatgctgaatgactttgtttcagaaagtatcatctcttatgtgggatgtatgactcagctatttttcttctgtttctttgtcaattctgagtgctatgtgttggtatcaatggcctatgatcgctatgtggccatctgcaaccccctgctctacatggtcaccatgtccccaagggtctgctttctgctgatgtttggttcctatgtggtagggtttgctggggccatggcccacactggaagcatgctgcgactgaccttctgtgattccaacgtcattgaccattatctgtgtgacgttctccccctcttgcagctctcctgcaccagcacccatgtcagtgagctggtatttttcattgttgttggagtaatcaccatgctatccagcataagcatcgtcatctcttacgctttgatactctccaacatcctctgtattccttctgcagagggcagatccaaagcctttagcacatggggctcccacataattgctgttgctctgttttttgggtcagggacattcacctacttaacaacatcttttcctggctctatgaaccatggcagatttgcctcagtcttttacaccaatgtggttcccatgcttaacccttcgatctacagtttgaggaataaggatgataaacttgccctgggcaaaaccctgaagagagtgctcttctaa

SEQ ID NO: 400 - protein, 309 aa, Homo sapiens
MTLRNSSSVTEFILVGLSEQPELQLPLFLLFLGIYVFTVVGNLGLITLIGINPSLHTPMYFFLFNLSFIDLCYSCVFTPKMLNDFVSESIISYVGCMTQLFFFCFFVNSECYVLVSMAYDRYVAICNPLLYMVTMSPRVCFLLMFGSYVVGFAGAMAHTGSMLRLTFCDSNVIDHYLCDVLPLLQLSCTSTHVSELVFFIVVGVITMLSSISIVISYALILSNILCIPSAEGRSKAFSTWGSHIIAVALFFGSGTFTYLTTSFPGSMNHGRFASVFYTNVVPMLNPSIYSLRNKDDKLALGKTLKRVLF

SEQ ID NO: 401 - DNA, 936 bp, Homo sapiens
  CDS (1)..(936)
atggctacttcaaaccattcttcaggggctgagtttatcctggcaggcttgacacaacgcccagaacttcaactgccactcttcctcctgttccttggaatatatgtggtcacagtggtggggaacctgggcatgatcttcttaattgctctcagttctcaactttaccctccagtgtattattttctcagtcatttgtctttcattgatctctgctactcctctgtcattacccctaagatgctggtgaactttgttccagaggagaacattatctcctttctggaatgcattactcaactttatttcttccttatttttgtaattgcagaaggctaccttctgacagccatggaatatgaccgttatgttgctatctgtcgcccactgctttacaatattgtcatgtcccacagggtctgttccataatgatggctgtggtatactcactgggttttctgtgggccacagtccatactacccgcatgtcagtgttgtcattctgtaggtctcatacggtcagtcattatttttgtgatattctccccttattgactctgtcttgctccagcacccacatcaatgagattctgctgttcattattggaggagttaataccttagcaactacactggcggtccttatctcttatgctttcattttctctagtatccttggtattcattccactgaggggcaatccaaagcctttggcacttgtagctcccatctcttggctgtgggcatcttttttgggtctataacattcatgtatttcaagcccccttccagcactactatggaaaaagagaaggtgtcttctgtgttctacatcacaataatccccatgctgaatcctctaatctatagcctgaggaacaaggatgtgaaaaatgcactgaagaagatgactaggggaaggcagtcatcctga

SEQ ID NO: 402 - protein, 311 aa, Homo sapiens
MATSNHSSGAEFILAGLTQRPELQLPLFLLFLGIYVVTVVGNLGMIFLIALSSQLYPPVYYFLSHLSFIDLCYSSVITPKMLVNFVPEENIISFLECITQLYFFLIFVIAEGYLLTAMEYDRYVAICRPLLYNIVMSHRVCSIMMAVVYSLGFLWATVHTTRMSVLSFCRSHTVSHYFCDILPLLTLSCSSTHINEILLFIIGGVNTLATTLAVLISYAFIFSSILGIHSTEGQSKAFGTCSSHLLAVGIFFGSITFMYFKPPSSTTMEKEKVSSVFYITIIPMLNPLIYSLRNKDVKNALKKMTRGRQSS

SEQ ID NO: 403 - DNA, 942 bp, Homo sapiens
  CDS (1)..(942)
atgctggctagaaacaactccttagtgactgaatttattcttgctggattaacagatcgtccagagttctggcaacccttctttttcctgttcctagtgatctacattgtcaccatggtaggcaaccttggcttgatcactcttttcggtctaaattctcacctccacacaccaatgtactatttcctcttcaatctctccttcattgatctctgttactcctctgttttcactcccaaaatgctaatgaactttgtgtcaaaaaagaatattatctccaatgttgggtgcatgactcggctgtttttctttctctttttcgtcatctctgaatgttacatgttgacctcaatggcatatgatcgctatgtggccatctgtaatccattgctgtataaggtcaccatgtcccatcaggtctgttctatgctcacttttgctgcttacataatgggattggctggagccacggcccacaccgggtgcatgtttagactcaccttctgcagtgctaatatcattaaccattacttgtgtgacatactccccctcctccagctttcctgcaccagcacctatgtcaacgaggtggttgttctcattgttgtgggtactaatatcacggtacccagttgtaccatcctcatttcttatgttttcattgtcactagcattcttcatatcaaatccactcaaggaagatcaaaagccttcagtacttgtagctctcatgtcattgctctgtctctgttttttgggtcagcggcattcatgtatattaaatattcttctggatctatggagcagggaaaagttttttctgttttctacactaatgtggtgcccatgctcaatcccctcatctacagtttgaggaacaaggatgtcaaagttgcactgaggaaagctctgattaaaattcagaggagaaatatattctaa

SEQ ID NO: 404 - protein, 313 aa, Homo sapiens [sequence omitted]

SEQ ID NO: 405 - DNA, 927 bp, Homo sapiens
  CDS (1)..(927)
atgaccatggaaaattattctatggcagctcagtttgtcttagatggtttaacacagcaagcagagctccagctgcccctcttcctcctgttcctgggaatctatgtggtcacagtagtgggcaacctgggcatgattctcctgattgcagtcagccctctacttcacacccccatgtactatttcctcagcagcttgtccttcgtcgatttctgctattcctctgtcattactcccaaaatgctggtgaacttcctaggaaagaagaatacaatcctttactctgagtgcatggtccagctctttttctttgtggtctttgtggtggctgagggttacctcctgactgccatggcatatgatcgctatgttgccatctgtagcccactgctttataatgcgatcatgtcctcatgggtctgctcactgctagtgctggctgccttcttcttgggctttctctctgccttgactcatacaagtgccatgatgaaactgtccttttgcaaatcccacattatcaaccattacttctgtgatgttcttcccctcctcaatctctcctgctccaacacacacctcaatgagcttctactttttatcattgcggggtttaacaccttggtgcccaccctagctgttgctgtctcctatgccttcatcctctacagcatccttcacatccgctcctcagagggccggtccaaagcttttggaacatgcagctctcatctcatggctgtggtgatcttctttgggtccattaccttcatgtatttcaagcccccttcaagtaactccctggaccaggagaaggtgtcctctgtgttctacaccacggtgatccccatgctgaaccctttaatatacagtctgaggaataaggatgtgaagaaagcattaaggaaggtcttagtaggaaaatga

SEQ ID NO: 406 - protein, 308 aa, Homo sapiens
MTMENYSMAAQFVLDGLTQQAELQLPLFLLFLGIYVVTVVGNLGMILLIAVSPLLHTPMYYFLSSLSFVDFCYSSVITPKMLVNFLGKKNTILYSECMVQLFFFVVFVVAEGYLLTAMAYDRYVAICSPLLYNAIMSSWVCSLLVLAAFFLGFLSALTHTSAMMKLSFCKSHIINHYFCDVLPLLNLSCSNTHLNELLLFIIAGFNTLVPTLAVAVSYAFILYSILHIRSSEGRSKAFGTCSSHLMAVVIFFGSITFMYFKPPSSNSLDQEKVSSVFYTTVIPMLNPLIYSLRNKDVKKALRKVLVGK

SEQ ID NO: 407 - DNA, 999 bp, Homo sapiens
  CDS (1)..(999)
atgttagagggtgttgagcatctccttctgctacttcttttgacagatgtgaacagcaaggaactgcaaagtggaaaccagacttctgtgtctcacttcattttggtgggcctgcaccacccaccacagctgggagcgccactcttcttagctttccttgtcatctatctcctcactgtttctggaaatgggctcatcatcctcactgtcttagtggacatccggctccatcgtcccatgtgcttgttcctgtgtcacctctccttcttggacatgaccatttcttgtgctattgtccccaagatgctggctggctttctcttgggtagtaggattatctcctttgggggctgtgtaatccaactattttctttccatttcctgggctgtactgagtgcttcctttacacactcatggcttatgaccgtttccttgccatttgtaagcccttacactatgctaccatcatgacccacagagtctgtaactccctggctttaggcacctggctgggagggactatccattcacttttccaaacaagttttgtattccggctgcccttctgtggccccaatcgggtcgactacatcttctgtgacattcctgccatgctgcgtctagcctgcgccgatacggccatcaacgagctggtcacctttgcagacattggcttcctggccctcacctgcttcatgctcatcctcacttcctatggctatattgtagctgccatcctgcgaattccgtcagcagatgggcgccgcaatgccttctccacttgtgctgcccacctcactgttgtcattgtttactatgtgccctgcaccttcatttacctgcggccttgttcacaggagcccctggatggggtggtagctgtcttttacactgtcatcactcccttgcttaactccatcatctacacactgtgcaacaaagaaatgaaggcagcattacagaggctagggggccacaaggaagtgcagcctcactga

SEQ ID NO: 408 - protein, 332 aa, Homo sapiens
MLEGVEHLLLLLLLTDVNSKELQSGNQTSVSHFILVGLHHPPQLGAPLFLAFLVIYLLTVSGNGLIILTVLVDIRLHRPMCLFLCHLSFLDMTISCAIVPKMLAGFLLGSRIISFGGCVIQLFSFHFLGCTECFLYTLMAYDRFLAICKPLHYATIMTHRVCNSLALGTWLGGTIHSLFQTSFVFRLPFCGPNRVDYIFCDIPAMLRLACADTAINELVTFADIGFLALTCFMLILTSYGYIVAAILRIPSADGRRNAFSTCAAHLTVVIVYYVPCTFIYLRPCSQEPLDGVVAVFYTVITPLLNSIIYTLCNKEMKAALQRLGGHKEVQPH

SEQ ID NO: 409 - DNA, 1128 bp, Homo sapiens
  CDS (1)..(1128)
  modified_base (924)..(1023): a, t, c, g, other or unknown
atgtccaacgccaccctactgacagcgttcatcctcacgggccttccccatgccccagggctggacgcccccctctttggaatcttcctggtggtttacgtgctcactgtgctggggaacctcctcatcctgctggtgatcagggtggattctcacctccacacccccatgtactacttcctcaccaacctgtccttcattgacatgtggttctccactgtcacggtgcccaaaatgctgatgaccttggtgtccccaagcggcaggactatctccttccacagctgcgtggctcagctctattttttccacttcctggggagcaccgagtgtttcctctacacagtcatgtcctatgatcgctacctggccatcagttacccgctcaggtacaccaacatgatgactgggcgctcgtgtgccctcctggccaccggcacttggctcagtggctctctgcactctgctgtccagaccatattgactttccatttgccctactgtggacccaaccagatccagcactacttctgtgacgcaccgcccatcctgaaactggcctgtgcagacacctcagccaacgagatggtcatctttgtgaatattgggctagtggcctcgggctgctttgtcctgatagtgctgtcctatgtgtccatcgtctgttccatcctgcggatccgcacctcagaggggaggcacagagcctttcagacctgtgcctcccactgtatcgtggtcctttgcttctttggccctggtcttttcatttacctgaggccaggctccagggacgccttgcatggggttgtggccgttttctacaccacgctgactcctcttttcaaccctgttgtgtacaccctgagaaacaaggaggtaaagaaagctctgttgaagctgaaaaatggtcagtattgtcannnnnnnnnnnnnnnnnnnnnnnnnnnnnnnnnnnnnnnnnnnnnnnnnnnnnnnnnnnnnnnnnnnnnnnnnnnnnnnnnnnnnnnnnnnnnnnnnnnnagtgaagtctattgtgtcctctgtggtgtcaagtctcactacactcagataacagtgttttgggcagggttctctttaattgtctctttccctggccacagctag

SEQ ID NO: 410 - protein, 375 aa, Homo sapiens
  MOD_RES (309)..(341): Variable amino acid
MSNATLLTAFILTGLPHAPGLDAPLFGIFLVVYVLTVLGNLLILLVIRVDSHLHTPMYYFLTNLSFIDMWFSTVTVPKMLMTLVSPSGRTISFHSCVAQLYFFHFLGSTECFLYTVMSYDRYLAISYPLRYTNMMTGRSCALLATGTWLSGSLHSAVQTILTFHLPYCGPNQIQHYFCDAPPILKLACADTSANEMVIFVNIGLVASGCFVLIVLSYVSIVCSILRIRTSEGRHRAFQTCASHCIVVLCFFGPGLFIYLRPGSRDALHGVVAVFYTTLTPLFNPVVYTLRNKEVKKALLKLKNGQYCTXXXXXXXXXXXXXXXXXXXXXXXXXXXXXXXXXSEVYCVLCGVKSHYTQITVFWAGFSLIVSFPGHS

SEQ ID NO: 411 - DNA, 732 bp, Homo sapiens
  CDS (1)..(732)
atgtggttctccactgtcacggtgcccaaaatgctgatgaccttggtgtccccaagcggcagggctatctccttccacagctgcgtggctcagctctattttttccacttcctggggagcaccgagtgtttcctctacacagtcatgtcctatgatcgctacttggccatcagttacccgctcaggtacaccagcatgatgagtgggagcaggtgtgccctcctggccaccggcacttggctcagtggctctctgcactctgctgtccagaccatattgactttccatttgccctactgtggacccaaccagatccagcactacttctgtgacgcaccgcccatcctgaaactggcctgtgcagacacctcagccaacgtgatggtcatctttgtggacattgggatagtggcctcaggctgctttgtcctgatagtgctgtcctatgtgtccatcgtctgttccatcctgcggatccgcacctcagatgggaggcgcagagcctttcagacctgtgcctcccactgtattgtggtcctttgcttctttgttccctgtgttgtcatttatctgaggccaggctccatggatgccatggatggagttgtggccattttctacactgtgctgacgccccttctcaaccctgttgtgtacaccctgagaaacaaggaggtgaagaaagctgtgttgaaacttagagacaaagtagcacatcctcagaggaaataa

SEQ ID NO: 412 - protein, 243 aa, Homo sapiens
MWFSTVTVPKMLMTLVSPSGRAISFHSCVAQLYFFHFLGSTECFLYTVMSYDRYLAISYPLRYTSMMSGSRCALLATGTWLSGSLHSAVQTILTFHLPYCGPNQIQHYFCDAPPILKLACADTSANVMVIFVDIGIVASGCFVLIVLSYVSIVCSILRIRTSDGRRRAFQTCASHCIVVLCFFVPCVVIYLRPGSMDAMDGVVAIFYTVLTPLLNPVVYTLRNKEVKKAVLKLRDKVAHPQRK

SEQ ID NO: 413 - DNA, 936 bp, Homo sapiens
  CDS (1)..(936)
atgtccaacgccagcctactgacagcgttcatcctcatgggccttccccatgccccagcgctggacgcccccctctttggagtcttcctggtggtttacgtgctcactgtgctggggaacctcctcatcctgctggtgatcagggtggattctcacctccacaccaccatgtactacttcctcaccaacctgtcgttcattgacatgtggttctccactgtcacggtgcccaaattgctgatgactttggtgttcccaagtggcagggctatctccttccacagctgcatggctcagctctatttctttcacttcctagggggcaccgagtgtttcctctacagggtcatgtcctgtgatcgctacctggccatcagttacccgctcaggtacaccagcatgatgactgggcgctcgtgtactcttctggccaccagcacttggctcagtggctctctgcactctgctgtccaggccatattgactttccatttgccctactgtggacccaactggatccagcactatttgtgtgatgcaccgcccatcctgaaactggcctgtgcagacacctcagccatagagactgtcatttttgtgactgttggaatagtggcctcgggctgctttgtcctgatagtgctgtcctatgtgtccatcgtctgttccatcctgcggatccgcacctcagaggggaagcacagagcctttcagacctgtgcctcccactgtatcgtggtcctttgcttctttggccctggtcttttcatttacctgaggccaggctccaggaaagctgtggatggagttgtggccgttttctacactgtgctgacgccccttctcaaccctgttgtgtacaccctgaggaacaaggaggtgaagaaagctctgttgaagctgaaagacaaagtagcacattctcagagcaaatag

SEQ ID NO: 414 - protein, 311 aa, Homo sapiens
MSNASLLTAFILMGLPHAPALDAPLFGVFLVVYVLTVLGNLLILLVIRVDSHLHTTMYYFLTNLSFIDMWFSTVTVPKLLMTLVFPSGRAISFHSCMAQLYFFHFLGGTECFLYRVMSCDRYLAISYPLRYTSMMTGRSCTLLATSTWLSGSLHSAVQAILTFHLPYCGPNWIQHYLCDAPPILKLACADTSAIETVIFVTVGIVASGCFVLIVLSYVSIVCSILRIRTSEGKHRAFQTCASHCIVVLCFFGPGLFIYLRPGSRKAVDGVVAVFYTVLTPLLNPVVYTLRNKEVKKALLKLKDKVAHSQSK

SEQ ID NO: 415 - DNA, 663 bp, Homo sapiens
  CDS (1)..(663)
atgggccagctatttacagaccacttgtttggtggaactgagatcttccttctggtggtgatggcctatgatcgctacgtggccatctgtaagccactgcactatttaaccatcatgaatcgacaggtttccatccttctgttggtggtggccatgactggaggtttccttcattctgtgtttcaaattgctgttctgtacagtctccctttctgtggccccaatgtcattgaccactttttctgtgacatgtacccattattggaactggcgtgcactgacacctactctataggcctcactgtagttttcagtggtggagcaatgtgtatggtcatcttcgcccttctactaatctcctatggagtcagcctaaactcccttaaaacttatagtcaggaagggaggcgtaaagccctgtctacctgcagctcgcacatcaccgtggttgtcctcttttttgttccctgtattttcatgtatgttagacctgtctcaaacttccctattgataaattcgttactgtgttttatacagttatcacacccatgctgaatccttttttatacacgttgagaaattcagagatgataaatgctataaaacacctgttgtgtaagaagctaactatagttagaataagagtgtccctcctcatgtag

SEQ ID NO: 416 - protein, 220 aa, Homo sapiens
MGQLFTDHLFGGTEIFLLVVMAYDRYVAICKPLHYLTIMNRQVSILLLVVAMTGGFLHSVFQIAVLYSLPFCGPNVIDHFFCDMYPLLELACTDTYSIGLTVVFSGGAMCMVIFALLLISYGVSLNSLKTYSQEGRRKALSTCSSHITVVVLFFVPCIFMYVRPVSNFPIDKFVTVFYTVITPMLNPFLYTLRNSEMINAIKHLLCKKLTIVRIRVSLLM

SEQ ID NO: 417 - DNA, 1548 bp, Homo sapiens
  CDS (1)..(1548)
  modified_base (896)..(995): a, t, c, g, other or unknown
atgcagcaaaataacagtgtgcctgaattcatactgttaggattaacacaggatcccttgaggcagaaaatagtgtttgtaatcttcttaattttctatatgggaactgtggtggggaatatgctcattattgtgaccatcaagtccagccggacactaggaagccccatgtacttctttctattttatttgtcctttgcagattcttgcttttcaacttccacagcccctagattaattgtggatgctctctctgaaaagaaaattataacctacaatgagtgcatgacacaagtctttgcactacatttatttggctgcatggagatctttgtcctcattctcatggctgttgatcgctatgtggccatctgtaagcccttgcgttacccaaccatcatgagccagcaggtctgcatcatcctgattgttcttgcctggatagggtctttaatacactctacagctcagattatcctggccttaagattgcctttctgtggaccctatttgattgatcattattgctgtgatttgcagcccttgttgaaacttgcctgcatggacacttacatgatcaacctgctgttggtgtctaacagtggggcaatttgctcaagtagtttcatgattttgataatttcatatattgtcatcttgcattcactgagaaaccacagtgccaaagggaagaaaaaggctctctccgcttgcacgtctcacataattgtagtcatcttattctttggcccatgtatattcatatatacacgccccccgaccactttccccatggacaagatggtggcagtattttatactattggaacaccctttctcaatccactcatctacacatctgaggaatgcagaagtgaaaaatgccatgagaaagnnnnnnnnnnnnnnnnnnnnnnnnnnnnnnnnnnnnnnnnnnnnnnnnnnnnnnnnnnnnnnnnnnnnnnnnnnnnnnnnnnnnnnnnnnnnnnnnnnnnaaagaagggaggagagagagagacaaagagggagggagggaaaggaagaaagaaagacagaaagagagagaagaaagagagagagagaaagaaagaagaaagaaagagagaaagaaaaagaaagaaagaaagaaaaaataaaaagaaaagagaggaagaagggaaagaacaagagaaagaaagaagaaagaaagggataacattttatcatgtagattactatagtactaaatccattattagacatttaaattgtttccaagttgaaactaataaaaatgctgtggttaaaatcttaaaaaaaaaaagaaagaaagaaagaagaaaaaagaaagacaagaaagaaagaagaaagaaagagaaagaagaaagaaaagaaagaaaaagaagaaagaaagaaagaaaggaaaagaaaagaaaggaagaaatgaaggaagaaaagaaagaaagaaagaaaaaagaaagaaagaaagaaagaaagagaaagaaagaaggaaagagaaagaaagaaaagaaagaaagaaagagagaaagggagggaaggaacaaatga

SEQ ID NO: 418 - protein, 515 aa, Homo sapiens
  MOD_RES (299)..(332): Variable amino acid
MQQNNSVPEFILLGLTQDPLRQKIVFVIFLIFYMGTVVGNMLIIVTIKSSRTLGSPMYFFLFYLSFADSCFSTSTAPRLIVDALSEKKIITYNECMTQVFALHLFGCMEIFVLILMAVDRYVAICKPLRYPTIMSQQVCIILIVLAWIGSLIHSTAQIILALRLPFCGPYLIDHYCCDLQPLLKLACMDTYMINLLLVSNSGAICSSSFMILIISYIVILHSLRNHSAKGKKKALSACTSHIIVVILFFGPCIFIYTRPPTTFPMDKMVAVFYTIGTPFLNPLIYTSEECRSEKCHEKXXXXXXXXXXXXXXXXXXXXXXXXXXXXXXXXXXKKGGERETKREGGKGRKKDRKREKKERERKKEERKRERKRKKERKNKKKREEEGKEQEKERRKKGITFYHVDYYSTKSIIRHLNCFQVETNKNAVVKILKKKRKKERRKKKDKKERRKKEKEERKERKRRKKERKEKKRKEEMKEEKKERKKKERKKERKRKKEGKRKKEKKERKREREGRNK

SEQ ID NO: 419 - DNA, 960 bp, Homo sapiens
  CDS (1)..(960)
atgacacctggagaactagcccttgccagtggcaaccacaccccagtcaccaagttcatcttgcagggattctccaattatccagacctccaggagcttctcttcggagccatcctgctcatctatgccataacagtggtgggcaacttgggaatgatggcactcatcttcacagactcccatctccaaagcccaatgtatttcttcctcaatgtcctctcgtttcttgatatttgttactcttctgtggtcacacctaagctcttggtcaacttcctggtctctgacaagtccatctcttttgagggctgtgtggtccagctcgccttctttgtagtgcatgtgacagctgagagcttcctgctggcctccatggcctatgaccgcttcctagccatctgtcaacccctccattatggttctatcatgaccagggggacctgtctccagctggtagctgtgtcctatgcatttggtggagccaactccgctatccagactggaaatgtctttgccctgcctttctgtgggcccaaccagctaacacactactactgtgacataccaccccttctccacctggcttgtgccaacacagccacagcaagagtggtcctctatgtcttttctgctctggtcacccttctgcctgctgcagtcattctcacctcctactgcttggtcttggtggccattgggaggatgcgctcagtagcagggagggagaaggacctctccacttgtgcctcccactttctggccattgccattttctatggcactgtggttttcacctatgttcagccccatggatctactaacaataccaatggccaagtagtgtccgtcttctacaccatcataattcccatgctcaatcccttcatctatagcctccgcaacaaggaggtgaagggcgctctgcagaggaagcttcaggtcaacatctttcccggctga

SEQ ID NO: 420 - protein, 319 aa, Homo sapiens
MTPGELALASGNHTPVTKFILQGFSNYPDLQELLFGAILLIYAITVVGNLGMMALIFTDSHLQSPMYFFLNVLSFLDICYSSVVTPKLLVNFLVSDKSISFEGCVVQLAFFVVHVTAESFLLASMAYDRFLAICQPLHYGSIMTRGTCLQLVAVSYAFGGANSAIQTGNVFALPFCGPNQLTHYYCDIPPLLHLACANTATARVVLYVFSALVTLLPAAVILTSYCLVLVAIGRMRSVAGREKDLSTCASHFLAIAIFYGTVVFTYVQPHGSTNNTNGQVVSVFYTIIIPMLNPFIYSLRNKEVKGALQRKLQVNIFPG

SEQ ID NO: 421 - DNA, 936 bp, Homo sapiens
  CDS (1)..(936)
atgagaagaaactgcacgttggtgactgagttcattctcctgggactgaccagtcgccgggaattacaaattctcctcttcacgctgtttctggccatttacatggtcacggtggcagggaaccttggcatgattgtcctcatccaggccaacgcctggctccacatgcccatgtactttttcctgagccacttatccttcgtggatctgtgcttctcttccaatgtgactccaaagatgctggagattttcctttcagagaagaaaagcatttcctatcctgcctgtcttgtgcagtgttacctttttatcgccttggtccatgttgagatctacatcctggctgtgatggcctttgaccggtacatggccatctgcaaccctctgctttatggcagcagaatgtccaagagtgtgtgctccttcctcatcacggtgccttatgtgtatggagcgctcactggcctgatggagaccatgtggacctacaacctagccttctgtggccccaatgaaattaatcacttctactgtgcggacccaccactgattaagctggcttgttctgacacctacaacaaggagttgtcaatgtttattgtggctggctggaacctttctttttctctcttcatcatatgtatttcctacctttacattttccctgctattttaaagattcgctctacagagggcaggcaaaaagctttttctacctgtggctcccatctgacagctgtcactatattctatgcaacccttttcttcatgtatctcagacccccctcaaaggaatctgttgaacagggtaaaatggtagctgtattttataccacagtaatccctatgctgaaccttataatttatagccttagaaataaaaatgtaaaagaagcattaatcaaagagctgtcaatgaagatatacttttcttaa

SEQ ID NO: 422 - protein, 311 aa, Homo sapiens
MRRNCTLVTEFILLGLTSRRELQILLFTLFLAIYMVTVAGNLGMIVLIQANAWLHMPMYFFLSHLSFVDLCFSSNVTPKMLEIFLSEKKSISYPACLVQCYLFIALVHVEIYILAVMAFDRYMAICNPLLYGSRMSKSVCSFLITVPYVYGALTGLMETMWTYNLAFCGPNEINHFYCADPPLIKLACSDTYNKELSMFIVAGWNLSFSLFIICISYLYIFPAILKIRSTEGRQKAFSTCGSHLTAVTIFYATLFFMYLRPPSKESVEQGKMVAVFYTTVIPMLNLIIYSLRNKNVKEALIKELSMKIYFS

SEQ ID NO: 423 - DNA, 924 bp, Homo sapiens
  CDS (1)..(924)
atgctcaatttcaccgatgtgacagagttcattcttttggggctaacgagccgtcgagaatggcaagttctcttcttcatcatctttcttgtggtctacatcatcaccatggtgggcaatatcggcatgatggtgttaatcaaggtcagtcctcagcttaacaaccccatgtactttttcctcagtcacttgtcatttgttgatgtgtggttttcttccaatgtcacccctaaaatgttggaaaacctgttatcagataaaaaaacaattacttatgctggttgtttagtacagtgtttcttcttcattgctcttgtccatgtggaaatttttattcttgctgcgatggcctttgatagatacatggcaattgggaatcctctgctttatggcagtaaaatgtcaagggttgtctgtattcgactgattactttcccttacatttatggttttctgacgagtctggcagcaacattatggacttacggcttgtacttctgtggaaaaattgagatcaaccatttctactgtgcagatccacctctcatcaaaatggcctgtgctgggacctttgtaaaagaatatacaatgatcatacttgccggcattaacttcacatattccctgactgtaattatcatctcttacttattcatcctcattgccattctgcgaatgcgctcagcagaaggaaggcagaaggccttttccacatgtgggtcccatctgacagctgtcattatattctatggtactctgatcttcatgtatctcagacgtcccacagaggagtctgtggagcaggggaagatggtggctgtgttctataccacagtgatccccatgttgaatcccatgatctacagtctgaggaacaaggatgtgaaaaaggccatgatgaaagtgatcagcagatcatgttaa

SEQ ID NO: 424 - protein, 307 aa, Homo sapiens
MLNFTDVTEFILLGLTSRREWQVLFFIIFLVVYIITMVGNIGMMVLIKVSPQLNNPMYFFLSHLSFVDVWFSSNVTPKMLENLLSDKKTITYAGCLVQCFFFIALVHVEIFILAAMAFDRYMAIGNPLLYGSKMSRVVCIRLITFPYIYGFLTSLAATLWTYGLYFCGKIEINHFYCADPPLIKMACAGTFVKEYTMIILAGINFTYSLTVIIISYLFILIAILRMRSAEGRQKAFSTCGSHLTAVIIFYGTLIFMYLRRPTEESVEQGKMVAVFYTTVIPMLNPMIYSLRNKDVKKAMMKVISRSC

SEQ ID NO: 425 - DNA, 945 bp, Homo sapiens
  CDS (1)..(945)
atggagaataatacagaggtgagtgaattcatcctgcttggtctaaccaatgccccagaactacaggttcccctctttatcatgtttaccctcatctacctcatcactctgactgggaacctggggatgatcatattaatcctgctggactctcatctccacactcccatgtacttttttctcagtaacctgtctcttgcaggcattggttactcctcagctgtcactccaaaggttttaactgggttgcttatagaagacaaagccatctcctacagtgcctgtgctgctcagatgttcttttgtgcagtctttgccactgtggaaaattacctcttgtcctcaatggcctatgaccgctacgcagcagtgtgtaaccccctacattataccaccaccatgacaacacgtgtgtgtgcttgtctggctataggctgttatgtcattggttttctgaatgcttctatccaaattggagatacatttcgcctctctttctgcatgtccaatgtgattcatcactttttctgtgacaaaccagcagtcattactctgacctgctctgagaaacacattagtgagttgattcttgttcttatatcaagttttaatgtcttttttgcacttcttgttaccttgatttcctatctgttcatattgatcaccattcttaagaggcacacaggtaagggataccagaagcctttatctacctgtggttctcacctcattgccattttcttattttatataactgtcatcatcatgtacatacgaccaagttccagtcattccatggacacagacaaaattgcatctgtgttctacactatgatcatccccatgctcagtcctatagtctataccctgaggaacaaagacgtgaagaatgcattcatgaaggttgttgagaaggcaaaatattctctagattcagtcttttaa

SEQ ID NO: 426 - protein, 314 aa, Homo sapiens
MENNTEVSEFILLGLTNAPELQVPLFIMFTLIYLITLTGNLGMIILILLDSHLHTPMYFFLSNLSLAGIGYSSAVTPKVLTGLLIEDKAISYSACAAQMFFCAVFATVENYLLSSMAYDRYAAVCNPLHYTTTMTTRVCACLAIGCYVIGFLNASIQIGDTFRLSFCMSNVIHHFFCDKPAVITLTCSEKHISELILVLISSFNVFFALLVTLISYLFILITILKRHTGKGYQKPLSTCGSHLIAIFLFYITVIIMYIRPSSSHSMDTDKIASVFYTMIIPMLSPIVYTLRNKDVKNAFMKVVEKAKYSLDSVF

SEQ ID NO: 427 - DNA, 900 bp, Homo sapiens
  CDS (1)..(900)
atggagccaaggaaaaatgtgactgactttgtcctcttgggcttcacacagaatccaaaggagcagaaagtactttttgttatgttcttgctcttctacattttgaccatggtgggcaacctgctcattgtagtgaccgtaactgtcagtgagaccctgggctcaccaatgtccttctttcttgctggcttaacatttatagatatcatttattcttcatccatttcccccagattgatttcagacttgttctttgggaataattccatatccttccaatctttcatggcccagctctttatcgagcacctttttggtgggtcagaggtctttctcctgttggtgatggcctatgaccgctatgtggccatctgtaagcccttgcattatttggttatcatgagacaatgggtgtgtgttttgctgctggtagtgtcctgggttggaggatttctgcaatcagtatttcaacttagcattatttatgggctcccattctgtggccccaatgtcattgatcattttttctgtgacatgtatcccttattgaaactggcctgcactgacacccatgttattggcctcttagtggtggccaatggaggactgtcttgcactattgcgtttctgctcttactcatctcttatggtgtcatcctgcactctctaaagaaacttagtcagaaagggaggcaaaaagcccactcaacctgcagttcccacatcactgtggttgtcttcttctttgttccttgtatttttatgtgtgctagacctgctaggaccttctccattgacaaatcagtgagtgtgttttatacagtcataaccccaatgctgaaccccttaatctacactctgagaaattctgagatgacaagtgctatgaagaagctttag

SEQ ID NO: 428 - protein, 299 aa, Homo sapiens
MEPRKNVTDFVLLGFTQNPKEQKVLFVMFLLFYILTMVGNLLIVVTVTVSETLGSPMSFFLAGLTFIDIIYSSSISPRLISDLFFGNNSISFQSFMAQLFIEHLFGGSEVFLLLVMAYDRYVAICKPLHYLVIMRQWVCVLLLVVSWVGGFLQSVFQLSIIYGLPFCGPNVIDHFFCDMYPLLKLACTDTHVIGLLVVANGGLSCTIAFLLLLISYGVILHSLKKLSQKGRQKAHSTCSSHITVVVFFFVPCIFMCARPARTFSIDKSVSVFYTVITPMLNPLIYTLRNSEMTSAMKKL

SEQ ID NO: 429 - DNA, 948 bp, Homo sapiens
  CDS (1)..(948)
atgagacagaataacaatattacagaatttgtcctcctgggcttttctcaggatcctggtgtgcaaaaagcattatttgtcatgtttttactcacatacttggtgacagtggtggggaacctgctcattgtggtggatattattgccagcccttccttgggttccccaatgtatttcttccttgcctgcctgtcatttatagatgctgcatattccactaccatttctcccaagttaattgtaggcttattctgtgataaaaagactatttccttccaaggttgcatgggccagctatttatagaccatttctttggtggggctgaggtcttccttctggtggtgatggcctgtgatcgctatgtggccatctgtaagccactgcactatttgaccatcatgaatcgacaggtttgcttccttctgttggtggtggccatgattggaggttttgtacattctgcgtttcaaattgttgtgtacagtctccctatctgtggtcccaatgtcattgttcatttcagttgtgacatgcacccattactggaactggcatgcactgacacctactttataggcctcactgttgttgtcaatagtggagcaatctgtatggtcattttcaaccttctgttaatctcctatggagtcatcctaagctcccttaaaacttacagtcaggaaaagaggggtaaagccttgtctacctgcagctccggcagtaccgttgttgtcctcttttttgtaccctgtattttcatatatgttagacctgtttcaaactttcctactgataagttcatgactgtgttttataccattatcacacacatgctgagtcctttaatatatacgttgagaaattcagagatgagaaatgctatagaaaaactcttgggtaaaaagttaactatatttattataggaggagtgtccgtcctcatgtag

SEQ ID NO: 430 - protein, 315 aa, Homo sapiens
MRQNNNITEFVLLGFSQDPGVQKALFVMFLLTYLVTVVGNLLIVVDIIASPSLGSPMYFFLACLSFIDAAYSTTISPKLIVGLFCDKKTISFQGCMGQLFIDHFFGGAEVFLLVVMACDRYVAICKPLHYLTIMNRQVCFLLLVVAMIGGFVHSAFQIVVYSLPICGPNVIVHFSCDMHPLLELACTDTYFIGLTVVVNSGAICMVIFNLLLISYGVILSSLKTYSQEKRGKALSTCSSGSTVVVLFFVPCIFIYVRPVSNFPTDKFMTVFYTIITHMLSPLIYTLRNSEMRNAIEKLLGKKLTIFIIGGVSVLM

SEQ ID NO: 431 - DNA, 801 bp, Homo sapiens
  CDS (1)..(801)
atgatcacactgattgggctcagttctcacctgcacacacctatgtactatttcctcagcagtctgtccttcattgacttctgccattccactgtcattacccctaagatgctggtgaactttgcgacagagaagaacatcatctcctaccctgaatgcatggctcagctctatttattcagtatttttgctattgcagagtgtcacatgttggctgcaatggcgtatgactgttatgttgccatctgcagccccttgctgtacaatgtcatcatgtcctatcaccactgcttctggctcacagtgggagtttacattttaggcatccttggatctacaattcataccagttttatgttgagactctttttgtgcaagactaatgtgattaaccattatttttgtgatcttttccctctcttggggctctcctgctccagcacctacatcaatgaattactggttctggtcttgagtgcatttaacatcctgatgcctgccttaaccatccttgcttcttacatctttatcattgccagcatcctccgcattcactccactgagggcaggtccaaagccttcagcacttgcagctcccacatcttggctgttgctgttttctttggatctgcagcattcatgtacctgcagccatcatctgtcagctccatggaccagaggaaagtgtcgtctgtgttttatactactattgtgcccatgctgaaccccctgatctacagcctgaggaataaagatgtcaaacttgccgtgaagaaaattctgcatcagacagcatgttaa

SEQ ID NO: 432 - protein, 266 aa, Homo sapiens
MITLIGLSSHLHTPMYYFLSSLSFIDFCHSTVITPKMLVNFATEKNIISYPECMAQLYLFSIFAIAECHMLAAMAYDCYVAICSPLLYNVIMSYHHCFWLTVGVYILGILGSTIHTSFMLRLFLCKTNVINHYFCDLFPLLGLSCSSTYINELLVLVLSAFNILMPALTILASYIFIIASILRIHSTEGRSKAFSTCSSHILAVAVFFGSAAFMYLQPSSVSSMDQRKVSSVFYTTIVPMLNPLIYSLRNKDVKLAVKKILHQTAC

SEQ ID NO: 433 - DNA, 939 bp, Homo sapiens
  CDS (1)..(939)
atgagaaatggcacagtaatcacagaattcatcctgctaggctttcctgttatccaaggcctacaaacacctctctttattgcaatctttctcacctacatattaacccttgcaggcaatgggcttattattgccactgtgtgggctgagcccaggctacaaattccaatgtacttcttcctttgtaacttgtctttcttagaaatctggtacaccaccacagtcatccccaaactgctaggaacctttgtagtggcaagaacagtaatctgcatgtcctgctgcctgctgcaggccttcttccacttcttcgtgggcaccaccgagttcttgatcctcactatcatgtcttttgaccgctacctcaccatctgcaatccccttcaccaccccaccatcatgaccagcaaactctgcctgcagctggccctgagctcctgggtggtgggcttcaccattgtcttttgtcagacgatgctgctcatccagttgccattctgtggcaataatgttatcagtcatttctactgtgatgttgggcccagtttgaaagccgcctgcatagacaccagcattttggaactcctgggcgtcatagcaaccatccttgtgatcccagggtcacttctctttaatatgatttcttatatctacattctgtccgcaatcctacgaattccttcagccactggccaccaaaagactttctctacctgtgcctcgcacctgacagttgtctccctgctctacggggctgttctgttcatgtacctaagacccacagcacactcctcctttaagattaataaggtggtgtctgtgctaaatactatcctcaccccccttctgaatccctttatttatactattagaaacaaggaggtgaagggagccttaagaaaggcaatgacttgcccaaagactggtcatgcaaagtaa

SEQ ID NO: 434 - protein, 312 aa, Homo sapiens
MRNGTVITEFILLGFPVIQGLQTPLFIAIFLTYILTLAGNGLIIATVWAEPRLQIPMYFFLCNLSFLEIWYTTTVIPKLLGTFVVARTVICMSCCLLQAFFHFFVGTTEFLILTIMSFDRYLTICNPLHHPTIMTSKLCLQLALSSWVVGFTIVFCQTMLLIQLPFCGNNVISHFYCDVGPSLKAACIDTSILELLGVIATILVIPGSLLFNMISYIYILSAILRIPSATGHQKTFSTCASHLTVVSLLYGAVLFMYLRPTAHSSFKINKVVSVLNTILTPLLNPFIYTIRNKEVKGALRKAMTCPKTGHAK

SEQ ID NO: 435 - DNA, 942 bp, Homo sapiens
  CDS (1)..(942)
atgggaaactggagcactgtgactgaaatcaccctaattgccttcccagctctcctggagattcgaatatctctcttcgtggttcttgtggtaacttacacattaacagcaacaggaaacatcaccatcatctccctgatatggattgatcatcgcctgcaaactccaatgtacttcttcctcagtaatttgtcctttctggatatcttatacaccactgtcattaccccaaagttgttggcctgcctcctaggagaagagaaaaccatatcttttgctggttgcatgatccaaacatatttctacttctttctggggacggtggagtttatcctcttggcggtgatgtcctttgaccgctacatggctatctgcgacccactgcactacacggtcatcatgaacagcagggcctgccttctgctggttctgggatgctgggtgggagccttcctgtctgtgttgtttccaaccattgtagtgacaaggctaccttactgtaggaaagaaattaatcatttcttctgtgacattgcccctcttcttcaggtggcctgtataaatactcacctcattgagaagataaactttctcctctctgcccttgtcatcctgagctccctggcattcactactgggtcctacgtgtacataatttctaccatcctgcgtatcccctccacccagggccgtcagaaagctttttctacctgtgcttctcacatcactgttgtctccattgcccacgggagcaacatctttgtgtatgtgagacccaatcagaactcctcactggattatgacaaggtggccgctgtcctcatcacagtggtgacccctctcctgaacccttttatctacagcttgaggaatgagaaggtacaggaagtgttgagagagacagtgaacagaatcatgaccttgatacaaaggaaaacttga

SEQ ID NO: 436 - protein, 313 aa, Homo sapiens
MGNWSTVTEITLIAFPALLEIRISLFVVLVVTYTLTATGNITIISLIWIDHRLQTPMYFFLSNLSFLDILYTTVITPKLLACLLGEEKTISFAGCMIQTYFYFFLGTVEFILLAVMSFDRYMAICDPLHYTVIMNSRACLLLVLGCWVGAFLSVLFPTIVVTRLPYCRKEINHFFCDIAPLLQVACINTHLIEKINFLLSALVILSSLAFTTGSYVYIISTILRIPSTQGRQKAFSTCASHITVVSIAHGSNIFVYVRPNQNSSLDYDKVAAVLITVVTPLLNPFIYSLRNEKVQEVLRETVNRIMTLIQRKT

SEQ ID NO: 437 - DNA, 930 bp, Homo sapiens
  CDS (1)..(930)
atggagaattgtacggaagtgacaaagttcattcttctaggactaaccagtgtcccagaactacagatccccctctttatcttgttcaccttcatctacctcctcactctgtgtgggaacctggggatgatgttgctgatcctgatggactcttgtctccacacccccatgtactttttcctcagtaacctgtctctggtggactttggatactcctcagctgtcactcccaaggtcatggctgggttccttagaggagacaaggtcatctcctacaatgcatgtgctgttcagatgttcttctttgtagccttggccacggtggaaaattacttgttggcctcaatggcctatgaccgctatgcagcagtgtgcaaacccctacactacaccaccaccatgacggccagtgtaggtgcctgtctggccctaggctcatatgtctgtggcttcctaaatgcctcattccacattgggggcatattcagtctctctttctgtaaatccaatctggtacatcactttttctgtgatgttccagcagtcatggctctgtcttgctctgataaacacactagtgaggtgattctggtttttatgtcaagctttaatatcttttttgttcttctagttatctttatctcctacttgttcatattcatcaccatcttgaagatgcattcagctaagggacaccaaaaagcattgtccacctgtgcctctcacttcactgcagtctccgtcttctatgggacagtaatcttcatctacttgcagcccagctccagccactccatggacacagacaaaatggcatctgtgttctatgctatgatcatccccatgctgaaccctgtggtctacagcctgaggaacagagaagtccagaatgcattcaagaaagtgttgagaaggcaaaaatttctataa

SEQ ID NO: 438 - protein, 309 aa, Homo sapiens
MENCTEVTKFILLGLTSVPELQIPLFILFTFIYLLTLCGNLGMMLLILMDSCLHTPMYFFLSNLSLVDFGYSSAVTPKVMAGFLRGDKVISYNACAVQMFFFVALATVENYLLASMAYDRYAAVCKPLHYTTTMTASVGACLALGSYVCGFLNASFHIGGIFSLSFCKSNLVHHFFCDVPAVMALSCSDKHTSEVILVFMSSFNIFFVLLVIFISYLFIFITILKMHSAKGHQKALSTCASHFTAVSVFYGTVIFIYLQPSSSHSMDTDKMASVFYAMIIPMLNPVVYSLRNREVQNAFKKVLRRQKFL

SEQ ID NO: 439 - DNA, 945 bp, Homo sapiens
  CDS (1)..(945)
atggaaaataagacagaagtaacacaattcattcttctaggactaaccaatgactcagaactgcaggttcccctctttataacgttccccttcatctatattatcactctggttggaaacctgggaattattgtattgatattctgggattcctgtctccacaatcccatgtacttttttctcagtaacttgtctctagtggacttttgctactcttcagctgtcactcccatcgtcatggctggattccttatagaagacaaggtcatctcttacaatgcatgtgctgctcaaatgtatatctttgtagcttttgccactgtggaaaattacctcttggcctcaatggcctatgaccgctatgcagcagtgtgcaaacccctacattacaccacaaccatgacaacaactgtgtgtgctcgtctggccataggctcctacctctgtggtttcctgaatgcctccatccacactggggacacatttagtctctctttctgtaagtccaatgaagtccatcactttttctgtgatattccagcagtcatggttctctcttgctctgatagacatattagcgagcttgttcttatttatgttgtgagcttcaatatctttatagctctcctggttatcttgatatcctacacattcatttttatcaccatcctaaagatgcactcagcttcagtataccagaagcctttgtccacctgtgcctctcatttcattgcagtcggcatcttctatgggactattatcttcatgtacttacaacccagctccagtcactccatggacacagacaaaatggcacctgtgttctatacaatggtcatccccatgctgaaccctctggtctatagtctgaggaacaaggaagtgaagagtgcattcaagaaagttgttgagaaggcaaaattgtctgtaggatggtcagtttaa

SEQ ID NO: 440 - protein, 314 aa, Homo sapiens
MENKTEVTQFILLGLTNDSELQVPLFITFPFIYIITLVGNLGIIVLIFWDSCLHNPMYFFLSNLSLVDFCYSSAVTPIVMAGFLIEDKVISYNACAAQMYIFVAFATVENYLLASMAYDRYAAVCKPLHYTTTMTTTVCARLAIGSYLCGFLNASIHTGDTFSLSFCKSNEVHHFFCDIPAVMVLSCSDRHISELVLIYVVSFNIFIALLVILISYTFIFITILKMHSASVYQKPLSTCASHFIAVGIFYGTIIFMYLQPSSSHSMDTDKMAPVFYTMVIPMLNPLVYSLRNKEVKSAFKKVVEKAKLSVGWSV

SEQ ID NO: 441 - DNA, 945 bp, Homo sapiens
  CDS (1)..(945)
atggagaacaacacagaggtgactgaattcatccttgtggggttaactgatgacccagaactgcagatcccactcttcatagtcttccttttcatctacctcatcactctggttgggaacctggggatgattgaattgattctactggactcctgtctccacacccccatgtacttcttcctcagtaacctctccctggtggactttggttattcctcagctgtcactcccaaggtgatggtggggtttctcacaggagacaaattcatattatataatgcttgtgccacacaattcttcttctttgtagcctttatcactgcagaaagtttcctcctggcatcaatggcctatgaccgctatgcagcattgtgtaaacccctgcattacaccaccaccatgacaacaaatgtatgtgcttgcctggccataggctcctacatctgtggtttcctgaatgcatccattcatactgggaacactttcaggctctccttctgtagatccaatgtagttgaacactttttctgtgatgctcctcctctcttgactctctcatgttcagacaactacatcagtgagatggttattttttttgtggtgggattcaatgacctcttttctatcctggtaatcttgatctcctacttatttatatttatcaccatcatgaagatgcgctcacctgaaggacgccagaaggccttttctacttgtgcttcccaccttactgcagtttccatcttttatgggacaggaatctttatgtacttacgacctaactccagccatttcatgggcacagacaaaatggcatctgtgttctatgccatagtcattcccatgttgaatccactggtctacagcctgaggaacaaagaggttaagagtgcctttaaaaagactgtagggaaggcaaaggcctctataggattcatattttaa

SEQ ID NO: 442 - protein, 314 aa, Homo sapiens
MENNTEVTEFILVGLTDDPELQIPLFIVFLFIYLITLVGNLGMIELILLDSCLHTPMYFFLSNLSLVDFGYSSAVTPKVMVGFLTGDKFILYNACATQFFFFVAFITAESFLLASMAYDRYAALCKPLHYTTTMTTNVCACLAIGSYICGFLNASIHTGNTFRLSFCRSNVVEHFFCDAPPLLTLSCSDNYISEMVIFFVVGFNDLFSILVILISYLFIFITIMKMRSPEGRQKAFSTCASHLTAVSIFYGTGIFMYLRPNSSHFMGTDKMASVFYAIVIPMLNPLVYSLRNKEVKSAFKKTVGKAKASIGFIF

SEQ ID NO: 443 - DNA, 777 bp, Homo sapiens
  CDS (1)..(777)
atgtactttttccttagtaatctgtcgtttctggacatctgctatgtttccactatagcccccaagatgctctcagacttcttcaagaagcataaattcatctcctttatggggtgcagtatgcagtactttttcttctctagcctaggtctaactgagtgctgtcttctggcagccatggcttatgatcgatatgctgccatttgcaaccctctgctctacagggccatcatgtttcccaccctctgcgtgcagatggtggcaggatcttgtataactggattcttaggctcatttatccaactctgtgccttgcttcagctccatttctgtgggccaaatgtcatcaaccatttcttctgtgatctgccccagctgctgattctatcctgttctgacacctttttctttcaagtcatgacctctgttctcacagtgatctttggactcacgtctgtcttagttatcatgatatcttatggttatatcattgccaccattctgaagatcacctcagctgaaggcagagccaaatctttcaacacttgtgcttctcaccttacagcagtgatccttttctttggctcaggtatctttgtttatatgtatcctaatgctggtgattccctgagccaaaacaagttggcatcagtcttatacacagttacaatccccatgttaaatccagtgatctacagcctgaggaacaaggaaatcaaagatgctctaaacagatggaagaagagaatcttctcctggtgttatggaatgaaataa

SEQ ID NO: 444 - protein, 258 aa, Homo sapiens [sequence omitted]

SEQ ID NO: 445 - DNA, 936 bp, Homo sapiens
  CDS (1)..(936)
atgactgggggaggaaatattacagaaatcacctatttcatcctgctgggattctcagattttcccaggatcataaaagtgctcttcactatattcctggtgatctacattacatctctggcctggaacctctccctcattgttttaataaggatggattcccacctccatacacccatgtatttcttcctcagtaacctgtccttcatagatgtctgctatatcagctccacagtccccaagatgctctccaacctcttacaggaacagcaaactatcacttttgttggttgtattattcagtactttatcttttcaacgatgggactgagtgagtcttgtctcatgacagccatggcttatgatcgttatgctgccatttgtaaccccctgctctattcatccatcatgtcacccaccctctgtgtttggatggtactgggagcctacatgactggcctcactgcttctttattccaaattggtgctttgcttcaactccacttctgtgggtctaatgtcatcagacatttcttctgtgacatgccccaactgttaatcttgtcctgtactgacactttctttgtacaggtcatgactgctatattaaccatgttctttgggatagcaagtgccctagttatcatgatatcctatggctatattggcatctccatcatgaagatcacttcagctaaaggcaggtccaaggcattcaacacctgtgcttctcatctaacagctgtttccctcttctatacatcaggaatctttgtctatttgagttccagctctggaggttcttcaagctttgacagatttgcatctgttttctacactgtggtcattcccatgttaaatcccttgatttacagtttgaggaacaaagaaattaaagatgccttaaagaggttgcaaaagagaaagtgctgctga

SEQ ID NO: 446 - protein, 311 aa, Homo sapiens
MTGGGNITEITYFILLGFSDFPRIIKVLFTIFLVIYITSLAWNLSLIVLIRMDSHLHTPMYFFLSNLSFIDVCYISSTVPKMLSNLLQEQQTITFVGCIIQYFIFSTMGLSESCLMTAMAYDRYAAICNPLLYSSIMSPTLCVWMVLGAYMTGLTASLFQIGALLQLHFCGSNVIRHFFCDMPQLLILSCTDTFFVQVMTAILTMFFGIASALVIMISYGYIGISIMKITSAKGRSKAFNTCASHLTAVSLFYTSGIFVYLSSSSGGSSSFDRFASVFYTVVIPMLNPLIYSLRNKEIKDALKRLQKRKCC

SEQ ID NO: 447 - DNA, 1059 bp, Homo sapiens
  CDS (1)..(1059)
atgacatctcaggaaagggatacagctatttattccattaatgtcagttttgttgcaaaggggatgactagccgctctgtgtgtgagaagatgaccatgacaacggagaaccccaaccagactgtggtgagccacttcttcctggagggtttgaggtacaccgctaaacattctagcctcttcttcctcctcttcctcctcatctacagcatcactgtggctgggaatctcctcatcctcctaactgtgggctctgactctcacctcagcttacccatgtaccacttcctggggcacctctccttcctggatgcctgtttgtctacagtgacagtgcccaaggtcatggcaggcctgctgactctggatgggaaggtgatctcctttgagggctgtgccgtacagctttattgcttccactttctggccagcactgagtgcttcctgtacacagtcatggcctatgaccgctatctggctatctgtcaacccctgcactacccagtggccatgaacagaaggatgtgtgcagaaatggctggaatcacctgggccataggtgccacgcacgctgcaatccacacctccctcaccttccgcctgctctactgtgggccttgccacattgcctacttcttctgcgacataccccctgtcctaaagctcgcctgtacagacaccaccattaatgagctagtcatgcttgccagcattggcatcgtggctgcaggctgcctcatcctcatcgttatttcctacatcttcatcgtggcagctgtgttgcgcatccgcacagcccagggccggcagcgggccttctccccctgcactgcccagctcactggggtgctcctgtactacgtgccacctgtctgtatctacctgcagcctcgctccagtgaggcaggagctggggcccctgctgtcttctacacaatcgtaactccaatgctcaacccattcatttacactttgcggaacaaggaggtgaagcatgctctgcaaaggcttttgtgcagcagcttccgagagtctacagcaggcagcccacccccatag

SEQ ID NO: 448 - protein, 352 aa, Homo sapiens [sequence omitted]

SEQ ID NO: 449 - DNA, 972 bp, Homo sapiens
  CDS (1)..(972)
atgaaccctgaaaactggactcaggtaacaagctttgtccttctgggtttccccagtagccacctcatacagttcctggtgttcctggggttaatggtgacctacattgtaacagccacaggcaagctgctaattattgtgctcagctggatagaccaacgcctgcacatacagatgtacttcttcctgcggaatttctccttcctggagctgttgctggtaactgttgtggttcccaagatgcttgtcgtcatcctcacgggggatcacaccatctcatttgtcagctgcatcatccagtcctacctctacttctttctaggcaccactgacttcttcctcttggccgtcatgtctctggatcgttacctggcaatctgccgaccactccgctatgagaccctgatgaatggccatgtctgttcccaactagtgctggcctcctggctagctggattcctctgggtcctttgccccactgtcctcatggccagcctgcctttctgtggccccaatggtattgaccacttctttcgtgacagttggcccttgctcaggctttcttgtggggacacccacctgctgaaactggtggctttcatgctctctacgttggtgttactgggctcactggctctgacctcagtttcctatgcctgcattcttgccactgttctcagggcccctacagctgctgagcgaaggaaagcgttttccacttgcgcctcgcatcttacagtggtggtcatcatctatggcagttccatctttctctacattcgtatgtcagaggctcagtccaaactgctcaacaaaggtgcctccgtcctgagctgcatcatcacacccctcttgaacccattcatcttcactctccgcaatgacaaggtgcagcaagcactgagagaagccttggggtggcccaggctcactgctgtgatgaaactgagggtcacaagtcaaaggaaatga

SEQ ID NO: 450 - protein, 323 aa, Homo sapiens
MNPENWTQVTSFVLLGFPSSHLIQFLVFLGLMVTYIVTATGKLLIIVLSWIDQRLHIQMYFFLRNFSFLELLLVTVVVPKMLVVILTGDHTISFVSCIIQSYLYFFLGTTDFFLLAVMSLDRYLAICRPLRYETLMNGHVCSQLVLASWLAGFLWVLCPTVLMASLPFCGPNGIDHFFRDSWPLLRLSCGDTHLLKLVAFMLSTLVLLGSLALTSVSYACILATVLRAPTAAERRKAFSTCASHLTVVVIIYGSSIFLYIRMSEAQSKLLNKGASVLSCIITPLLNPFIFTLRNDKVQQALREALGWPRLTAVMKLRVTSQRK

SEQ ID NO: 451 - DNA, 945 bp, Homo sapiens
  CDS (1)..(945)
atgggtgtaaaaaaccattccacagtgactgagtttcttctttcaggattaactgaacaagcagagcttcagctgcccctcttctgcctcttcttaggaatttacacagttactgtggtgggaaacctcagcatgatctcaattattaggctgaatcgtcaacttcatacccccatgtactatttcctgagtagtttgtcttttttagatttctgctattcttctgtcattacccctaaaatgctatcagggtttttatgcagagatagatccatctcctattctggatgcatgattcagctgttttttttctgtgtttgtgttatttctgaatgctacatgctggcagccatggcctgcgatcgctacgtggccatctgcagcccactgctctacagggtcatcatgtcccctagggtctgttctctgctggtggctgctgtcttctcagtaggtttcactgatgctgtgatccatggaggttgtatactcaggttgtctttctgtggatcaaacatcattaaacattatttctgtgacattgtccctcttattaaactctcctgctccagcacttatattgatgagcttttgatttttgtcattggtggatttaacatggtggccacaagcctaacaatcattatttcatatgcttttatcctcaccagcatcctgcgcatccactctaaaaagggcaggtgcaaagcgtttagcacctgtagctcccacctgacagctgttcttatgttttatgggtctctgatgtccatgtatctcaaacctgcttctagcagttcactcacccaggagaaagtatcctcagtattttataccactgtgattctcatgttgaatcccttgatatatagtctgaggaacaatgaagtaagaaatgctctgatgaaacttttaagaagaaaaatatctttatctccaggataa

SEQ ID NO: 452 - protein, 314 aa, Homo sapiens
MGVKNHSTVTEFLLSGLTEQAELQLPLFCLFLGIYTVTVVGNLSMISIIRLNRQLHTPMYYFLSSLSFLDFCYSSVITPKMLSGFLCRDRSISYSGCMIQLFFFCVCVISECYMLAAMACDRYVAICSPLLYRVIMSPRVCSLLVAAVFSVGFTDAVIHGGCILRLSFCGSNIIKHYFCDIVPLIKLSCSSTYIDELLIFVIGGFNMVATSLTIIISYAFILTSILRIHSKKGRCKAFSTCSSHLTAVLMFYGSLMSMYLKPASSSSLTQEKVSSVFYTTVILMLNPLIYSLRNNEVRNALMKLLRRKISLSPG

SEQ ID NO: 453 - DNA, 849 bp, Homo sapiens
  CDS (1)..(849)
atgactgtagtgggaaaccttcttattgtggtcatagtgacctccgacccacacctgcacacaaccatgtattttctcttgggcaatctttctttcctggacttttgctactcttccatcacagcacctaggatgctggttgacttgctctcaggcaaccctaccatttcctttggtggatgcctgactcaactcttcttcttccacttcattggaggcatcaagatcttcctgctgactgtcatggcgtatgaccgctacattgccatttcccagcccctgcactacacgctcattatgaatcagactgtctgtgcactccttatggcagcctcctgggtggggggcttcatccactccatagtacagattgcattgactatccagctgccattctgtgggcctgacaagctggacaacttttattgtgatgtgcctcagctgatcaaattggcctgcacagatacctttgtcttagagcttttaatggtgtctaacaatggcctggtgaccctgatgtgttttctggtgcttctgggatcgtacacagcactgctagtcatgctccgaagccactcacgggagggccgcagcaaggccctgtctacctgtgcctctcacattgctgtggtgaccttaatctttgtgccttgcatctacgtctatacaaggccttttcggacattccccatggacaaggccgtctctgtgctatacacaattgtcacccccatgctgaatcctgccatctataccctgagaaacaaggaagtgatcatggccatgaagaagctgtggaggaggaaaaaggaccctattggtcccctggagcacagacccttacattag

SEQ ID NO: 454 - protein, 282 aa, Homo sapiens [sequence omitted]

SEQ ID NO: 455 - DNA, 996 bp, Homo sapiens
  CDS (1)..(996)
  modified_base (868)..(967): a, t, c, g, other or unknown
atgttagagggtgttgagcatctccttctgctacttcttttgacagatgtgaacagcaaggaactgcaaagtggaaaccagacttctgtgtctcacttcattttggtgggcctgcaccacccaccacagctgggagcgccactcttcttagctttccttgtcatctatctcctcactgtttctggaaatgggctcatcatcctcactgtcttagtggacatccggctccatcgtcccatgtgcttgttcctgtgtcacctctccttcttggacatgaccatttcttgtgctattgtccccaagatgctggctggctttctcttgggtagtaggattatctcctttgggggctgtgtaatccaactattttctttccatttcctgggctgtactgagtgcttcctttacacactcatggcttatgaccgtttccttgccatttgtaagcccttacactatgctaccatcatgacccacagagtctgtaactccctggctttaggcacctggctgggagggactatccattcacttttccaaacaagttttgtattccggctgcccttctgtggccccaatcgggtcgactacatcttctgtgacattcctgccatgctgcgtctagcctgcgccgatacggccatcaacgagctggtcacctttgcagacattggcttcctggccctcacctgcttcatgctcatcctcacttcctatggctatattgtagctgccatcctgcgaattccgtcagcagatgggcgccgcaatgccttctccacttgtgctgcccacctcactgttgtcattgtttactatgtgcctgcaccttcatttacctgcggccttgttcacaggagccctggannnnnnnnnnnnnnnnnnnnnnnnnnnnnnnnnnnnnnnnnnnnnnnnnnnnnnnnnnnnnnnnnnnnnnnnnnnnnnnnnnnnnnnnnnnnnnnnnnnnctagatcagcatgcccaatagacatataa

SEQ ID NO: 456 - protein, 331 aa, Homo sapiens
  MOD_RES (290)..(323): Variable amino acid
MLEGVEHLLLLLLLTDVNSKELQSGNQTSVSHFILVGLHHPPQLGAPLFLAFLVIYLLTVSGNGLIILTVLVDIRLHRPMCLFLCHLSFLDMTISCAIVPKMLAGFLLGSRIISFGGCVIQLFSFHFLGCTECFLYTLMAYDRFLAICKPLHYATIMTHRVCNSLALGTWLGGTIHSLFQTSFVFRLPFCGPNRVDYIFCDIPAMLRLACADTAINELVTFADIGFLALTCFMLILTSYGYIVAAILRIPSADGRRNAFSTCAAHLTVVIVYYVPAPSFTCGLVHRSPGXXXXXXXXXXXXXXXXXXXXXXXXXXXXXXXXXXRSACPIDI

SEQ ID NO: 457 - DNA, 921 bp, Homo sapiens
  CDS (1)..(921)
atgcagaggagcaatcacacagtgactgagttcatcctgctgggcttcaccacagatccagggatgcaactgggcctctttgtggtgttcctgggtgtgtactgtctgactgtggtaggaagtagcaccctcatcgtgttgatctgtaatgactcccgcctacacacacccatgtattttgtcattggaaatctgtcatttctggatctctggtattcttctgtccacaccccaaagatcctagtgacctgcatctctgaagacaaaagcatctcctttgctggctgcctgtgtcagttcttctctgccaggctggcctatagtgagtgctacctactggctgccatggcttatgaccactacgtggccatctccaagcccctgctttatgctcagaccatgccaaggagattgtgcatctgtttggttttatattcctatactgggggttttgtcaatgcaataatattaaccagcaacacattcacattggatttttgtggtgacaatgtcattgatgactttttctgtgatgttccacccctcgtgaagctggcatgcagtgtgagagagagctaccaggctgtgctgcacttccttctggcctccaatgtcatctcccctactgtgctcatccttgcctcttacctctccatcatcaccaccatcctgaggatccactctacccagggccgcatcaaagtcttctccacatgctcctcccacctgatctccgttaccttatactatggctccattctctacaactactcccggccaagttccagctactccctcaagagggacaaaatggtttctaccttttatactatgctgttccccatgttgaatcccatgatctacagtctgaggagtaaagacatgaaagacgctctgaaaaaattcttcaagtcagcataa

SEQ ID NO: 458 - protein, 306 aa, Homo sapiens [sequence omitted]

SEQ ID NO: 459 - DNA, 918 bp, Homo sapiens
  CDS (1)..(918)
atgtatctggtcacggtgctgaggaacctgctcagcatcctggctgtcagctctgactcccacccccacacacccatgtacttcttcctctccaacctgtgctgggctgacatcggtttcaccttggccacggttcccaaaatgattgtggacatggggtcgcatagcaaagtcatctcttatgggggctgcctgacacagatgtctttcttggtactttttgcatgtatagtagacatgttcctgactgtgatggcttatgactgctttgtagccatctgtcgccctctgcactacccagtcatcgtgaatcctcacctctgtgtcttcttcgttttggtgtcctttttccttagcctgttggattcccagctgcacagttggattgtgttacaattcaccttcttcaagaatgtggaaatctctaattttgtctgtgagccatctcaacttctcaagcttgcctcttatgacagcgtcatcaatagcatattcatatattttgataatactatgtttggttttcttcccatttcagggatccttttgtcttactataaaattgtcccctccattctaaggatttcatcatcagatgggaagtacaaagccttctcagcctgtggctgtcacctggcagttgtttgcttattttatggaacaggcattggcgtgtacctgacttcagctgtggcaccacccctcaggaatggtatggtggcgtcagtgatgtacgctgtggtcacccccatgctgaaccctttcatctacagcctgagaaacagggacattcaaagtgccctgtggagggtgtgcaacaaaacagtcgaatctcatgatctgttccatcctttttcttgtgtggttgagaaagggcaaccacattcaatccctacatctgcaaatcctgccccttag

SEQ ID NO: 460 - protein, 305 aa, Homo sapiens [sequence omitted]

SEQ ID NO: 461 - DNA, 771 bp, Homo sapiens
  CDS (1)..(771)
atggtcttgatattgcggtatcattactctgaattaattccaatctccatatcattaacaggcatcaagaaacacaaatccatggctgatgttaattttacattggttactgagtttatccttttggaactgacagatcgtgctgaactgaagatggtcctcttcgtgttgttcctgctgatctacaccatttccctggtgggaaatataggaatgctctttctaatctatgtaactcccaaactccacacacccatgtattatttcctcagctgtctgtcatttgttgatgcctgctattcatcagtttttgcacccagaatgctgctgaacttctttgttgagcgggagacaatcttattctctgcatgtattgtgcagtattttttattcgtgtctctccttaccactgagggcttcttgctggccacaatggcttacgaccgttacatggccattgtgaaccctttactttatacagtagctatgactaaaatagtttgtattgtgctcgcatttgggtcatgtatgggaggtttaatcaactcattgacacatacaattggcttggtgaaactgtctttctgtgggccaaatgtcatcagtcacttcttctgtgatcttcccccactgttgaagctgtcatgttctgagacatctatgaatgaattgttgcttttgatcttctctggcattattgccacgctcacttttttgactgtggtgatctcctacatcttcattgttgctgctatcctgaggatccgctaa

SEQ ID NO: 462 - protein, 256 aa, Homo sapiens
MVLILRYHYSELIPISISLTGIKKHKSMADVNFTLVTEFILLELTDRAELKMVLFVLFLLIYTISLVGNIGMLFLIYVTPKLHTPMYYFLSCLSFVDACYSSVFAPRMLLNFFVERETILFSACIVQYFLFVSLLTTEGFLLATMAYDRYMAIVNPLLYTVAMTKIVCIVLAFGSCMGGLINSLTHTIGLVKLSFCGPNVISHFFCDLPPLLKLSCSETSMNELLLLIFSGIIATLTFLTVVISYIFIVAAILRIR

SEQ ID NO: 463 - DNA, 939 bp, Homo sapiens
  CDS (1)..(939)
atgatgggtagaaggaatgacacaaatgtggctgacttcatccttacgggactgtcagactctgaagaggtccagatggctctgtttatgctatttctcctcatatacctaattactatgctggggaatgtggggatgctattgataatccgcctggacctccagcttcacactcccatgtattttttccttactcacctgtcatttattgacctcagttactcaactgtcgtcacacctaaaaccttagcgaacttactgacttccaactatatttccttcacgggctgctttgcccagatgttctgttttgtcttcttgggtactgctgaatgttatcttctctcctcaatggcctatgatcgctatgcagcgatctgcagtcctctacactacacagttattatgcccaaaaggctctgcctcgctctcatcactgggccttatgtgattggctttatggactcctttgtcaatgtggtttccatgagcagattgcatttctgtgactcaaacataattcatcactttttctgtgacacttccccaattttagctctgtcctgcactgacacagacaacactgaaatgctgatattcattatcgctggttccaccctgatggtgtcccttatcacaatatctgcatcctatgtgtccattctctctaccatcctgaaaattaattccacttcaggaaagcagaaagctttctctacttgcgtctctcatctcttgggagtcaccatcttctatggaactatgatttttacttacttaaagccaagaaagtcttattccttgggaagagatcaagtggctcctgtgttttatactattgtgattcccatgctgaatccactcatttatagtcttagaaacagagaagtgaaaaatgctctcattagagtcatgcagagaagacaggactccaggtag

SEQ ID NO: 464 - protein, 312 aa, Homo sapiens
MMGRRNDTNVADFILTGLSDSEEVQMALFMLFLLIYLITMLGNVGMLLIIRLDLQLHTPMYFFLTHLSFIDLSYSTVVTPKTLANLLTSNYISFTGCFAQMFCFVFLGTAECYLLSSMAYDRYAAICSPLHYTVIMPKRLCLALITGPYVIGFMDSFVNVVSMSRLHFCDSNIIHHFFCDTSPILALSCTDTDNTEMLIFIIAGSTLMVSLITISASYVSILSTILKINSTSGKQKAFSTCVSHLLGVTIFYGTMIFTYLKPRKSYSLGRDQVAPVFYTIVIPMLNPLIYSLRNREVKNALIRVMQRRQDSR

SEQ ID NO: 465 - DNA, 801 bp, Homo sapiens
  CDS (1)..(801)
atgtattattttcttagcaacttatctttcttagacatcagctgttctacagcaatcactcctaaaatgctggcaaacttcttggcatccaggaaaagcatctctccttatgggtgtgcactacaaatgtttttcttcgcttcttttgctgatgctgagtgccttatcctggcagcaatggcttatgaccgctatgcagccatctgcaacccactgctctatactacactgatgtctaggagagtctgtgtctgcttcattgtgttggcatatttcagtggaagtacaacatcactggtccatgtgtgcctcacattcaggctgtcattttgtggctccaatatcgtcaatcattttttctgtgatatcccacctcttctggctttatcatgtacagacactcagatcaaccagcttctgctctttgctttgtgcagcttcatccagaccagcacttttgtggtaatatttatttcttacttctgcatcctcatcactgtgttgagcatcaagtcctcaggtggcagaagcaaaacattctccacttgtgcttcccacctcatagcagtcaccttattctatggagcgctcctgtttatgtacttacagcccaccactagctattccctagacactgataaggtggtggcagtgttttatactgttgtatttcccatgtttaatccaataatttatagtttcagaaacaaggatgtgaaaaatgctctcaaaaagctattagaaagaattggatattcaaatgaatggtatttaaatcgtttaagaatagtcaatatctaa

SEQ ID NO: 466 - protein, 266 aa, Homo sapiens
MYYFLSNLSFLDISCSTAITPKMLANFLASRKSISPYGCALQMFFFASFADAECLILAAMAYDRYAAICNPLLYTTLMSRRVCVCFIVLAYFSGSTTSLVHVCLTFRLSFCGSNIVNHFFCDIPPLLALSCTDTQINQLLLFALCSFIQTSTFVVIFISYFCILITVLSIKSSGGRSKTFSTCASHLIAVTLFYGALLFMYLQPTTSYSLDTDKVVAVFYTVVFPMFNPIIYSFRNKDVKNALKKLLERIGYSNEWYLNRLRIVNI

SEQ ID NO: 467 - DNA, 933 bp, Homo sapiens
  CDS (1)..(933)
atggctggcaacaatttcactgaggttaccgtcttcatcctctctggatttgcaaatcaccctgaattacaagtcagtcttttcttgatgtttctcttcatttatctattcactgttttgggaaacctgggactgatcacgttaatcagaatggattctcagcttcacacccctatgtactttttcctgagcaatttagcatttattgacatattttactcctctactgtaacacctaaggcattggtgaatttccaatccaatcggagatccatctcctttgttggctgctttgttcaaatgtacttttttgttggattggtgtgttgtgagtgtttccttctgggatcaatggcctacaatcgctacatagcaatctgcaatcccttactgtattcagtagtcatgtcccaaaaagtgtccaactggctgggagtaatgccatatgtgataggcttcacaagctcgctgatatctgtctgggtgataagcagtttggcgttctgtgattccagcatcaatcattttttttgtgacaccacagctcttttagcactctcctgtgtagatacattcggcacagaaatggtgagctttgtcttagctggattcactcttcttagctctctccttatcatcacagtcacttatatcatcatcatctcagccatcctgaggatccagtcagcagcaggcaggcagaaggccttctccacctgcgcatcccacctcatggctgtaactatcttttatgggtctctgattttcacctatttgcaacctgataacacatcatcgctgacccaggcgcaggtggcatctgtattctatacgattgtcattcccatgctgaatccactcatctacagtctgaggaacaaagatgtgaaaaatgctcttctgagagtcatacatagaaaactttttccatga

SEQ ID NO: 468 - protein, 310 aa, Homo sapiens
MAGNNFTEVTVFILSGFANHPELQVSLFLMFLFIYLFTVLGNLGLITLIRMDSQLHTPMYFFLSNLAFIDIFYSSTVTPKALVNFQSNRRSISFVGCFVQMYFFVGLVCCECFLLGSMAYNRYIAICNPLLYSVVMSQKVSNWLGVMPYVIGFTSSLISVWVISSLAFCDSSINHFFCDTTALLALSCVDTFGTEMVSFVLAGFTLLSSLLIITVTYIIIISAILRIQSAAGRQKAFSTCASHLMAVTIFYGSLIFTYLQPDNTSSLTQAQVASVFYTIVIPMLNPLIYSLRNKDVKNALLRVIHRKLFP

SEQ ID NO: 469 - DNA, 864 bp, Homo sapiens
  CDS (1)..(864)
atggctctgtttatgctatttctcctgatatacctaattactatgctggggaatgtggggatgatattgataatccgcctggacctccagcttcacactcccatgtattttttccttactcacctgtcatttattgacctcagttactcaactgtcgtcacacctaaaaccttagcgaacttactgacttccaactatatttcctttacgggctgctttgcccagatgttcttttttgccttcttgggtactgctgaatgttaccttctctcctcaatggcccatgatcgctatgcagcgatctgcagtcctctacactacacagttattatgtccaaaaggctctgcctcgctctcatcactgggccttatgtgattggctttatagactcctttgtcaacgtggtttccatgagcagattgcatttctacgactcaaacgtaattcatcactttttctgtgacacttccccaattttagctctgtcctgcactgatacatacaacaccgaaatcctgatattcattattgttggttccaccctgatggtgtcccttttcacaatatctgcatcctatgtgttcattctctttaccatcctgaaaattaattccacttcaggaaagcagaaagctttctctacttgcgtctctcatctcttgggagtcaccatcttttatagcactctgatttttacttatttaaaaccaagaaagtcttattccttgggaagagatcaagtggcttctgttttttatactattgtgattcccgtgctgaatccactcatttatagtcttagaaacaaagaggtgaaaaatgctgtcatcagagtcatgcagagaagacaggactccaggtaa

SEQ ID NO: 470 - protein, 287 aa, Homo sapiens
MALFMLFLLIYLITMLGNVGMILIIRLDLQLHTPMYFFLTHLSFIDLSYSTVVTPKTLANLLTSNYISFTGCFAQMFFFAFLGTAECYLLSSMAHDRYAAICSPLHYTVIMSKRLCLALITGPYVIGFIDSFVNVVSMSRLHFYDSNVIHHFFCDTSPILALSCTDTYNTEILIFIIVGSTLMVSLFTISASYVFILFTILKINSTSGKQKAFSTCVSHLLGVTIFYSTLIFTYLKPRKSYSLGRDQVASVFYTIVIPVLNPLIYSLRNKEVKNAVIRVMQRRQDSR

SEQ ID NO: 471 - DNA, 924 bp, Homo sapiens
  CDS (1)..(924)
atggaaagcgagaacagaacagtgataagagaattcatcctccttggtctgacccagtctcaagatattcagctcctggtctttgtgctagttttaatattctacttcatcatcctccctggaaattttctcattattttcaccataaagtcagaccctgggctcacagcccccctctatttctttctgggcaacttggccttcctggatgcatcctactccttcactgtggctccccggatgttggtggacttcctctctgcgaagaagataatctcctacagaggctgcatcactcagctctttttcttgcacttccttggaggaggggagggattactccttgttgtgatggcctttgaccgctacatcgccatctgccggcctctgcactatcctactgtcatgaaccctagaacctgctatgcaatgatgttggctctgtggcttgggggttttgtccactccattatccaggtggtcctcatcctccgcttgcctttttgtggcccaaaccagctggacaacttcttctgtgatgtcccacaggtcatcaagctggcctgcaccgacacatttgtggtggagcttctgatggtcttcaacagtggcctgatgacactcctgtgctttctggggcttctggcctcctatgcagtcattctttgtcgcatacgagggtcttcttctgaggcaaaaaacaaggccatgtccacgtgcatcacccatatcattgttatattcttcatgtttggacctggcatcttcatctacacgcgccccttcagggctttcccagctgacaaggtggtttctctcttccacacagtgatttttcctttgttgaatcctgtcatttatacccttcgcaaccaggaagtgaaagcttccatgaaaaaggtgtttaataagcacatagcctga

SEQ ID NO: 472 - protein, 307 aa, Homo sapiens [sequence omitted]

SEQ ID NO: 473 - DNA, 936 bp, Homo sapiens
  CDS (1)..(936)
atggctcacacaaatgaatcgatggtgtctgagtttgtacttttgggactctctaattcctggggacttcaacttttcttttttgccatcttctctatagtctatgtgacatcagtgctaggcaatgtcttaattattgtcattatttcttttgactcccatttgaactctcctatgtacttcttgctcagtaatctttctttcattgatatctgtcagtctaactttgccacccccaagatgcttgtagacttttttattgagcgcaagactatctcctttgagggttgcatggcccagatattcgttcttcacagttttgttgggagtgagatgatgttgcttgtagctatggcatatgacagatttatagccatatgtaagcctctgcactacagtacaattatgaaccggaggctctgtgtaatttttgtgtctatttcctgggcggtgggcgttcttcattctgtgagccacttggcttttacagtggacctgccattctgtggtcccaatgaggtggatagcttcttttgtgaccttcccttggtgatagagctggcttgcatggatacatatgaaatggaaattatgaccctaacgaacagtggcctgatatcattgagctgtttcctggctttaattatttcctacaccatcattttgatcggtgtccgatgcaggtcctccagtgggtcatctaaggctctttctacattaactgcccacatcacagtggtcattcttttcttcgggccttgcatttatttctatatatggccttttagcagacttcctgtggacaaatttctttctgtgttctacactgtttgtactcccttgttgaaccccatcatctactctctgaggaatgaagatgttaaagcagccatgtggaagctgagaaaccgtcatgtgaactcctggaaaaactag

SEQ ID NO: 474 - protein, 311 aa, Homo sapiens
MAHTNESMVSEFVLLGLSNSWGLQLFFFAIFSIVYVTSVLGNVLIIVIISFDSHLNSPMYFLLSNLSFIDICQSNFATPKMLVDFFIERKTISFEGCMAQIFVLHSFVGSEMMLLVAMAYDRFIAICKPLHYSTIMNRRLCVIFVSISWAVGVLHSVSHLAFTVDLPFCGPNEVDSFFCDLPLVIELACMDTYEMEIMTLTNSGLISLSCFLALIISYTIILIGVRCRSSSGSSKALSTLTAHITVVILFFGPCIYFYIWPFSRLPVDKFLSVFYTVCTPLLNPIIYSLRNEDVKAAMWKLRNRHVNSWKN

SEQ ID NO: 475 - DNA, 978 bp, Homo sapiens
  CDS (1)..(978)
atgctagagtccttccagaaatcagagcaaatggcctggagcaatcagtctgcggtaaccgaattcatactacggggtctgtccagttctttagaactccagattttctacttcctgtttttctccatagtctatgcagccactgtgctggggaaccttcttattgtggtcaccattgcatcagagccacaccttcattcccctacgtactttctgctgggcaatctctccttcattgacatgtccctggcctcatttgccacccccaaaatgattgcagacttccttagagaacacaaagccatctcttttgaaggctgcatgacccagatgttcttcctacatctcttagggggtgctgagattgtactgctgatctccatgtcctttgataggtacgtggctatctgtaagcctctacattacctaacaatcatgagccgaagaatgtgtgttgggcttgtgatactttcctggattgtcggcatcttccatgctctgagtcagttagcatttacagtgaatctgcccttctgtggacccaatgaagtagacagtttcttttgtgacctccctttggtgattaaacttgcttgtgtcgacacatatattctgggggtgttcatgatctcaaccagtggcatgattgccctggtgtgcttcatcctcttggtgatctcttacactatcatcctggtcaccgttcggcagcgttcctctggtggatcctccaaagccctctccacgtgcagtgcccactttactgttgtgacccttttctttggcccatgcactttcatttatgtgtggcctttcacaaatttcccaatagacaaagtactctcagtattttataccatatacactcccctcttgaatccagtgatctataccgttaggaataaagatgtcaagtattccatgaggaaactaagcagccatatctttaaatctaggaagactgatcatactccttaa

SEQ ID NO: 476 - protein, 325 aa, Homo sapiens [sequence omitted]

SEQ ID NO: 477 - DNA, 945 bp, Homo sapiens
  CDS (1)..(945)
atggatgtgggcaataagtctaccatgtctgaatttgttttgctggggctctctaattcctgggaactacagatgtttttctttatggtgttttcattgctttatgtggcaacaatggtgggtaacagcctcatagtcatcacagttatagtggaccctcacctacactctcctatgtatttcctgcttaccaatctttcaatcattgatatgtctcttgcttctttcgccaccccaaagatgattacagattacctaacaggtcacaaaaccatctcttttgatggctgccttacccagatattctttctccaccttttcactggaactgagatcatcttactcatggccatgtcctttgataggtatattgcaatatgcaagcccctgcactatgcttctgtcattagtccccaggtgtgtgttgctctcgtggtggcttcctggattatgggagttatgcattcaatgagtcaggtcatatttgccctcacgttaccattctgtggtccctatgaggtagacagctttttctgtgaccttcctgtggtgttccagttggcttgtgtggatacttatgttctgggcctctttatgatctcaacaagtggcataattgcgttgtcctgttttattgttttatttaattcatatgttattgtcctggttactgtgaagcatcattcttccagaggatcatctaaggccctttctacttgtacagctcatttcattgttgtcttcttgttctttgggccatgcatcttcatctacatgtggccactaagcagctttctcacagacaagattctgtctgtgttttataccatctttactcccactctgaacccaataatctatactttgaggaatcaagaagtaaagatagccatgaggaaactgaaaaataggtttctaaattttaataaggcaatgccttcatag

SEQ ID NO: 478 - protein, 314 aa, Homo sapiens
MDVGNKSTMSEFVLLGLSNSWELQMFFFMVFSLLYVATMVGNSLIVITVIVDPHLHSPMYFLLTNLSIIDMSLASFATPKMITDYLTGHKTISFDGCLTQIFFLHLFTGTEIILLMAMSFDRYIAICKPLHYASVISPQVCVALVVASWIMGVMHSMSQVIFALTLPFCGPYEVDSFFCDLPVVFQLACVDTYVLGLFMISTSGIIALSCFIVLFNSYVIVLVTVKHHSSRGSSKALSTCTAHFIVVFLFFGPCIFIYMWPLSSFLTDKILSVFYTIFTPTLNPIIYTLRNQEVKIAMRKLKNRFLNFNKAMPS

SEQ ID NO: 479 - DNA, 972 bp, Homo sapiens
  CDS (1)..(972)
atggataagtccaattcttcagtggtgtctgaatttgtactgttgggactctgtagttctcaaaaactccagcttttctatttttgtttcttctctgtgttgtatacagtcattgtgctgggaaatcttctcattatcctcacagtgacttctgataccagcctgcactcccctatgtactttctcttgggaaacctttcctttgttgacatttgtcaggcttcttttgctacccctaaaatgattgcagattttctgagtgcacacgagaccatatctttcagtggctgcatagcccaaattttctttattcacctttttactggaggggagatggtgctacttgtttcgatggcctatgacaggtatgtagccatatgcaaacccttatactatgtggtcatcatgagccgaaggacatgcactgtcttggtaatgatctcctgggctgtgagcttggtgcacacattaagccagttatcatttactgtgaacctgcctttttgtggacctaatgtagtagacagctttttttgtgatcttcctcgagtcaccaaacttgcctgcctggactcttacatcattgaaatactaattgtggtcaatagtggaattctttccctaagcactttctctctcttggtcagctcctacatcattattcttgttacagtttggctcaagtcttcagctgcaatggcaaaggcattttctacgctggcttcccatattgcagtagtaatattattctttggaccttgcatcttcatctatgtgtggccctttaccatctctcctttggataaatttcttgccatattttacactgttttcacccccgtcctaaaccccattatttatacactaaggaatagggatatgaaggctgccgtaaggaaaattgtgaaccattacctgaggccaaggagaatttctgaaatgtcactagtagtgagaacttcctttcattaa

SEQ ID NO: 480 - protein, 323 aa, Homo sapiens
MDKSNSSVVSEFVLLGLCSSQKLQLFYFCFFSVLYTVIVLGNLLIILTVTSDTSLHSPMYFLLGNLSFVDICQASFATPKMIADFLSAHETISFSGCIAQIFFIHLFTGGEMVLLVSMAYDRYVAICKPLYYVVIMSRRTCTVLVMISWAVSLVHTLSQLSFTVNLPFCGPNVVDSFFCDLPRVTKLACLDSYIIEILIVVNSGILSLSTFSLLVSSYIIILVTVWLKSSAAMAKAFSTLASHIAVVILFFGPCIFIYVWPFTISPLDKFLAIFYTVFTPVLNPIIYTLRNRDMKAAVRKIVNHYLRPRRISEMSLVVRTSFH

SEQ ID NO: 481 - DNA, 951 bp, Homo sapiens
  CDS (1)..(951)
atggttgaagaaaatcataccatgaaaaatgagtttatcctcacaggatttacagatcaccctgagctgaagactctgctgtttgtggtgttctttgccatctatctgatcaccgtggtggggaatattagtttggtggcactgatatttacacaccgtcggcttcacacaccaatgtacatctttctgggaaatctggctcttgtggattcttgctgtgcctgtgctattacccccaaaatgttagagaacttcttttctgagggcaaaaggatttccctctatgaatgtgcagtacagttttattttctttgcactgtggaaactgcagactgctttcttctggcagcagtggcctatgaccgctatgtggccatctgcaacccactgcagtaccacatcatgatgtccaagaaactctgcattcagatgaccacaggcgccttcatagctggaaacctgcattccatgattcatgtagggcttgtatttaggttagttttctgtggatcgaatcacatcaaccacttttactgtgatattcttcccttgtatagactctcctgtgttgaccctttcatcaatgaactggttctattcatcttctcaggttcagttcaagtctttaccataggtagtgtcttaatatcttatctctatattcttcttactattttcagaatgaaatccaaggagggaagggccaaagctttttctacctgtgcatcccacttttcatcagtttcattattctatggatctcttttcttcctatacattagaccaaatttgcttgaagaaggaggtaatgatataccagctgctattttatttacaatagtagttcccttactaaatcctttcatttatagcctgagaaacaaggaagtaataagtgtcttaagaaaaattctgctgaaaataaaatctcaaggaagtgtgaacaaatga

SEQ ID NO: 482 - protein, 316 aa, Homo sapiens
MVEENHTMKNEFILTGFTDHPELKTLLFVVFFAIYLITVVGNISLVALIFTHRRLHTPMYIFLGNLALVDSCCACAITPKMLENFFSEGKRISLYECAVQFYFLCTVETADCFLLAAVAYDRYVAICNPLQYHIMMSKKLCIQMTTGAFIAGNLHSMIHVGLVFRLVFCGSNHINHFYCDILPLYRLSCVDPFINELVLFIFSGSVQVFTIGSVLISYLYILLTIFRMKSKEGRAKAFSTCASHFSSVSLFYGSLFFLYIRPNLLEEGGNDIPAAILFTIVVPLLNPFIYSLRNKEVISVLRKILLKIKSQGSVNK

SEQ ID NO: 483 - DNA, 954 bp, Homo sapiens
  CDS (1)..(954)
atgctaaggaatggcagcatagtgacggaatttatcctcgtgggctttcagcagagctccacttccacacgagcattgctctttgccctcttcttggccctctacagcctcaccatggccatgaatggcctcatcatctttatcacctcctggacagaccccaagctcaacagccccatgtacttcttcctcggccatctgtctctcctggatgtctgcttcatcaccactaccatcccacagatgttgatccacctcgtggtcagggaccacattgtctcctttgtatgttgcatgacccagatgtactttgtcttctgtgttggtgtggccgagtgcatcctcttggctttcatggcctatgaccgttatgttgctatctgctacccacttaactatgtcccgatcataagccagaaggtctgtgtcaggcttgtgggaactgcctggttctttgggctgatcaatggcatctttctcgagtatatttcattccgagagcccttccgcagagacaaccacatagaaagcttcttctgtgaggcccccatagtgattggcctctcttgtggggaccctcagtttagtctgtgggcaatctttgccgatgccatcgtggtaattctcagccccatggtgctcactgtcacttcctatgtgcacatcctggccaccatcctcagcaaagcctcctcctcaggtcgggggaagactttctctacttgtgcctctcacctgactgtggtcatctttctctacacttcagctatgttctcttacatgaacccccacagcacacatgggcctgacaaagacaaacctttctccctcctgtacaccatcattacccccatgtgcaaccccatcatttatagtttccgcaacaaggaaattaaggaggccatggtgagggcacttggaagaaccaggctggcccagccacagtctgtctag

SEQ ID NO: 484 - protein, 317 aa, Homo sapiens
MLRNGSIVTEFILVGFQQSSTSTRALLFALFLALYSLTMAMNGLIIFITSWTDPKLNSPMYFFLGHLSLLDVCFITTTIPQMLIHLVVRDHIVSFVCCMTQMYFVFCVGVAECILLAFMAYDRYVAICYPLNYVPIISQKVCVRLVGTAWFFGLINGIFLEYISFREPFRRDNHIESFFCEAPIVIGLSCGDPQFSLWAIFADAIVVILSPMVLTVTSYVHILATILSKASSSGRGKTFSTCASHLTVVIFLYTSAMFSYMNPHSTHGPDKDKPFSLLYTIITPMCNPIIYSFRNKEIKEAMVRALGRTRLAQPQSV

SEQ ID NO: 485 - DNA, 918 bp, Homo sapiens
  CDS (1)..(918)
atggtgactgaattcatttttctgggtctctctgattctcaggaactccagaccttcctatttatgttgttttttgtattctatggaggaatcgtgtttggaaaccttcttattgtcataacagtggtatctgactcccaccttcactctcccatgtacttcctgctagccaacctctcactcattgatctgtctctgtcttcagtcacagcccccaagatgattactgactttttcagccagcgcaaagtcatctctttcaagggctgccttgttcagatatttctccttcacttctttggtgggagtgagatggtgatcctcatagccatgggctttgacagatatatagcaatatgcaaacccctacactacactacaattatgtgtggcaacgcatgtgtcggcattatggctgtcgcatggggaattggctttctccattcggtgagccagttggcctttgccgtgcacttacccttctgtggtcccaatgaggtcgatagtttttattgtgaccttcctagggtaatcaaacttgcctgtacagatacctacaggctagatattatggtcattgctaacagtggtgtgctcactgtgtgttcttttgttcttctaatcatctcatacactatcatcctaatgaccatccagcattgccctttagataagtcgtccaaagctctgtccactttgactgctcacattacagtagttcttttgttctttggaccatgtgtctttatttatgcctggccattccccatcaagtcattagataaattccttgctgtattttattctgtgatcacccctctcttgaacccaattatatacacactgaggaacaaagacatgaagacggcaataagacggctgagaaaatgggatgcacattctagtgtaaagttttag

SEQ ID NO: 486 - protein, 305 aa, Homo sapiens
MVTEFIFLGLSDSQELQTFLFMLFFVFYGGIVFGNLLIVITVVSDSHLHSPMYFLLANLSLIDLSLSSVTAPKMITDFFSQRKVISFKGCLVQIFLLHFFGGSEMVILIAMGFDRYIAICKPLHYTTIMCGNACVGIMAVAWGIGFLHSVSQLAFAVHLPFCGPNEVDSFYCDLPRVIKLACTDTYRLDIMVIANSGVLTVCSFVLLIISYTIILMTIQHCPLDKSSKALSTLTAHITVVLLFFGPCVFIYAWPFPIKSLDKFLAVFYSVITPLLNPIIYTLRNKDMKTAIRRLRKWDAHSSVKF

SEQ ID NO: 487 - DNA, 984 bp, Homo sapiens
  CDS (1)..(984)
atgcttcataccaacaatacacagtttcacccttccaccttcctcgtagtgggggtcccagggctggaagatgtgcatgtatggattggcttccccttctttgcggtgtatctaacagcccttctagggaacatcattatcctgtttgtgatacagactgaacagagcctccaccaacccatgttttacttcctagccatgttggccggcactgatctgggcttgtctacagcaaccatccccaagatgctgggaattttctggtttaatcttggagagattgcatttggtgcctgcatcacacagatgtataccattcatatatgcactggcctggagtctgtggtactgacagtcacgggcatagatcgctatattgccatctgcaaccccctgagatatagcatgatccttaccaacaaggtaatagccattctgggcatagtcatcattgtcaggactttggtatttgtgactccattcacatttctcaccctgagattgcctttctgtggtgtccggattatccctcatacctattgtgaacacatgggcttggcaaagttagcttgtgccagtattaatgttatatatggattgattgccttctcagtgggatacattgacatttctgtgattggattttcctatgtccagatcctccgagctgtcttccatctcccagcctgggatgcccggcttaaggcactcagcacatgtggctctcacgtctgtgttatgttggctttctacctgccagccctcttttccttcatgacacaccgctttggccacaacatccctcattacatccacattcttctggccaatctgtatgtggtttttccccctgctcttaactctgttatctatggggtcaaaacaaaacagatacgagagcaggtacttaggatactcaaccctaaaagcttttggcattttgaccccaagaggatcttccacaacaattcagttagacaataa

SEQ ID NO: 488 - protein, 327 aa, Homo sapiens
MLHTNNTQFHPSTFLVVGVPGLEDVHVWIGFPFFAVYLTALLGNIIILFVIQTEQSLHQPMFYFLAMLAGTDLGLSTATIPKMLGIFWFNLGEIAFGACITQMYTIHICTGLESVVLTVTGIDRYIAICNPLRYSMILTNKVIAILGIVIIVRTLVFVTPFTFLTLRLPFCGVRIIPHTYCEHMGLAKLACASINVIYGLIAFSVGYIDISVIGFSYVQILRAVFHLPAWDARLKALSTCGSHVCVMLAFYLPALFSFMTHRFGHNIPHYIHILLANLYVVFPPALNSVIYGVKTKQIREQVLRILNPKSFWHFDPKRIFHNNSVRQ

SEQ ID NO: 489 - DNA, 930 bp, Homo sapiens
  CDS (1)..(930)
atggcgaatagaaacaatgtgacagagtttattctattggggcttacagagaatccaaaaatgcagaaaatcatatttgttgtgttttctgtcatctacatcaacgccatgataggaaatgtgctcattgtggtcaccatcactgccagcccatcactgagatcccccatgtactttttcctggcctatctctcctttattgatgcctgctattcctctgtcaatacccctaagctgatcacagattcactctatgaaaacaagactatcttattcaatggatgtatgactcaagtctttggagaacattttttcagaggtgttgaggtcatcctacttactgtaatggcctatgaccactatgtggccatctgcaagcccttgcactataccaccatcatgaagcagcatgtttgtagcctgctagtgggagtgtcatgggtaggaggctttcttcatgcaaccatacagatcctcttcatctgtcaattacctttctgtggtcctaatgtcatagatcactttatgtgtgatctctacactttgatcaatcttgcctgcactaatacccacactctaggactcttcattgctgccaacagtgggttcatatgcctgttaaactgtctcttgctcctggtctcctgcgtggtcatactgtactccttaaagacccacagcttagaggcaaggcatgaagccctctctacctgtgtctcccacatcacagttgtcatcttatcctttataccctgcatatttgtgtacatgagacctccagctactttacccattgataaagcagttgctgtattctacactatgataacttctatgttaaaccccttaatctacaccttgaggaatgctcaaatgaaaaatgccattaggaaattgtgtagtaggaaagctatttcaagtgtcaaataa

SEQ ID NO: 490 - protein, 309 aa, Homo sapiens
MANRNNVTEFILLGLTENPKMQKIIFVVFSVIYINAMIGNVLIVVTITASPSLRSPMYFFLAYLSFIDACYSSVNTPKLITDSLYENKTILFNGCMTQVFGEHFFRGVEVILLTVMAYDHYVAICKPLHYTTIMKQHVCSLLVGVSWVGGFLHATIQILFICQLPFCGPNVIDHFMCDLYTLINLACTNTHTLGLFIAANSGFICLLNCLLLLVSCVVILYSLKTHSLEARHEALSTCVSHITVVILSFIPCIFVYMRPPATLPIDKAVAVFYTMITSMLNPLIYTLRNAQMKNAIRKLCSRKAISSVK

SEQ ID NO: 491 - DNA, 930 bp, Homo sapiens
  CDS (1)..(930)
atggagaagaaaaagaatgtgactgaattcattttaataggtcttacacagaaccccataatggagaaagtcacgtttgtagtatttttggttctttacatgataacactttcaggcaacctgctcattgtggttaccattaccaccagccaggctctgagctcccccatgtacttcttcctgacccacctttctttgatagacacagtttattcttcttcttcagctcctaagttgattgtggattcctttcaagagaagaaaatcatctcctttaatgggtgtatggctcaagcctatgcagaacacatttttggtgctactgagatcatcctgctgacagtgatggcctgtgactgctatgtggccatctgcaaacctctgaactacacaaccattatgagccacagcctgtgcattctcctggtggcagtggcctgggtgggaggatttcttcatgcaactattcagattctctttacagtatggctgcccttctgtggccccaatgtcataggccacttcatgtgtgacttgtacccattgttaaaacttgtttgcatagacactcatacccttggtctctttgttgctgtgaacagtgggtttatctgcttattaaacttccttatcttggtggtatcctatgtgatcatcttgagatctttaaagaacaatagcttggaggggaggtgtaaagccctctccacctgtatttctcacatcatagtagttgtcttattctttgtgccctgtatatttgtgtatctgcgctcagtgaccactctgcccattgataaagctgttgctgtattttatactatggtggtcccaatgttaaatcccgtggtctacacactcagaaatgctgaggtaaaaagtgcaataaggaagctttggagaaaaaaagtgacttcagataatgattaa

SEQ ID NO: 492 - protein, 309 aa, Homo sapiens
MEKKKNVTEFILIGLTQNPIMEKVTFVVFLVLYMITLSGNLLIVVTITTSQALSSPMYFFLTHLSLIDTVYSSSSAPKLIVDSFQEKKIISFNGCMAQAYAEHIFGATEIILLTVMACDCYVAICKPLNYTTIMSHSLCILLVAVAWVGGFLHATIQILFTVWLPFCGPNVIGHFMCDLYPLLKLVCIDTHTLGLFVAVNSGFICLLNFLILVVSYVIILRSLKNNSLEGRCKALSTCISHIIVVVLFFVPCIFVYLRSVTTLPIDKAVAVFYTMVVPMLNPVVYTLRNAEVKSAIRKLWRKKVTSDND

SEQ ID NO: 493 - DNA, 975 bp, Homo sapiens
  CDS (1)..(975)
atggagagccccaatcaaaccaccattcaggagtttatcttctccgctttcccttattcctgggttaagtctgttgtctgctttgttccactgctcttcatctatgctttcattgttgttggaaacctggtcatcatcacagtggtccagttgaatactcacctccacactcccatgtatacttttatcagtgctctttcttttctggagatttggtataccacagccacaatcccaaagatgctgtctagcctgcttagtgagaggagcatttccttcaatggttgtctcctgcagatgtatttcttccattccaccggcatctgtgaggtgtgtctcttgacagttatggcctttgaccactacctggccatatgcagccctcttcattatccctctatcatgacccccaagctatgtacccaactgactttaagttgctgtgtttgtggctttatcacacccgttcctgagattgcctggatctctacactgccattttgtggttcgaatcaccttgaacatatcttctgtgacttcctcccagtgctgcgtctggcctgcacagacacacgagccatcgtcatgattcaggtagtggatgtcattcatgcagtggagattattacagctgtgatgctcatcttcatgtcctacgatggtattgtggctgtaattctacgtattcattcagctggaggccgccgcacagcattttccacgtgtgtctctcacttcattgtcttttcgctcttctttggcagtgtgactctcatgtacctacgcttctctgccacctactctttgttctgggatatagccattgctctggcctttgcagttttgtctcccttcttcaaccccattatctatagcctgaggaataaagaaataaaagaagctataaaaaagcacataggtcaagctaagatatttttttccgtaagaccagggacctcaagtaagatattttag

SEQ ID NO: 494 - protein, 324 aa, Homo sapiens
MESPNQTTIQEFIFSAFPYSWVKSVVCFVPLLFIYAFIVVGNLVIITVVQLNTHLHTPMYTFISALSFLEIWYTTATIPKMLSSLLSERSISFNGCLLQMYFFHSTGICEVCLLTVMAFDHYLAICSPLHYPSIMTPKLCTQLTLSCCVCGFITPVPEIAWISTLPFCGSNHLEHIFCDFLPVLRLACTDTRAIVMIQVVDVIHAVEIITAVMLIFMSYDGIVAVILRIHSAGGRRTAFSTCVSHFIVFSLFFGSVTLMYLRFSATYSLFWDIAIALAFAVLSPFFNPIIYSLRNKEIKEAIKKHIGQAKIFFSVRPGTSSKIF

SEQ ID NO: 495 - DNA, 1032 bp, Homo sapiens
  CDS (1)..(1032)
atgaagcaatattcagtgggtaatcaacattccaattataggagtctcttgtttccttttctgtgttcacagatgacacagttgacggccagtgggaatcagacaatggtgactgagttcctcttctctatgttcccgcatgcgcacagaggtggcctcttattctttattcccttgcttctcatctacggatttatcctaactggaaacctaataatgttcattgtcatccaggtgggcatggccctgcacacccctttgtatttctttatcagtgtcctctccttcctggagatctgctataccacaaccaccatccccaagatgctgtcctgcctaatcagtgagcagaagagcatttccgtggctggctgcctcctgcagatgtactttttccactcacttggtatcacagaaagctgtgtcctgacagcaatggccattgacaggtacatagctatctgcaatccactccgttacccaaccatcatgattcccaaactttgtatccagctgacagttggatcctgcttttgtggcttcctccttgtgcttcctgagattgcatggatttccaccttgcctttctgtggctccaaccagatccaccagatattctgtgatttcacacctgtgctgagcttggcctgcacagatacattcctagtggtcattgtggatgccatccatgcagcggaaattgtagcctccttcctggtcattgctctatcctacatccggattattatagtgattctgggaatgcactcagctgaaggtcatcacaaggccttttccacctgtgctgctcaccttgctgtgttcttgctattttttggcagtgtggctgtcatgtatttgagattctcagccacctactcagtgttttgggacacagcaattgctgtcacttttgttatccttgctccctttttcaaccccatcatctatagcctgaaaaacaaggacatgaaagaggctattggaaggcttttccactatcagaagagggctggttgggctgggaaatag

SEQ ID NO: 496 - protein, 343 aa, Homo sapiens
MKQYSVGNQHSNYRSLLFPFLCSQMTQLTASGNQTMVTEFLFSMFPHAHRGGLLFFIPLLLIYGFILTGNLIMFIVIQVGMALHTPLYFFISVLSFLEICYTTTTIPKMLSCLISEQKSISVAGCLLQMYFFHSLGITESCVLTAMAIDRYIAICNPLRYPTIMIPKLCIQLTVGSCFCGFLLVLPEIAWISTLPFCGSNQIHQIFCDFTPVLSLACTDTFLVVIVDAIHAAEIVASFLVIALSYIRIIIVILGMHSAEGHHKAFSTCAAHLAVFLLFFGSVAVMYLRFSATYSVFWDTAIAVTFVILAPFFNPIIYSLKNKDMKEAIGRLFHYQKRAGWAGK

SEQ ID NO: 497 - DNA, 996 bp, Homo sapiens
  CDS (1)..(996)
atgtgctggactatgccctctccatttacaggtagctctactagaaatatggagagcagaaaccaatcaacagtgactgaatttatcttcactggattccctcagcttcaggatggtagtctcctgtacttctttcctttacttttcatctatacttttattatcattgataacttattaatcttctctgctgtaaggctggacacccatctccacaaccccatgtataattttatcagtatattttcctttctggagatctggtacaccacagccaccattcccaagatgctctccaacctcatcagtgaaaagaaggccatctcaatgactggctgcatcttgcagatgtatttcttccactcacttgaaaactcagaggggatcttgctgaccaccatggccattgacagatacgttgccatctgcaaccctcttcgctatcaaatgatcatgaccccccggctctgtgctcacctctctgcaggttcctgcctcttcggtttccttatcctgcttcccgagattgtgatgatttccacactgcctttctgtgggcccaaccaaatccatcagatcttctgtgacttggtccctgtgctaagcctggcctgtacagacacgtccatgattctgattgaggatgtgattcatgctgtgaccatcatcattaccttcctaatcattgccctgtcctatgtaagaattgtcactgtgatattgaggattccctcttctgaagggaggcaaaaggctttttctacctgtgcaggccacctcatggtcttcctgatattctttggcagtgtatcactcatgtacttgcgtttcagcaacacttatccaccagttttggacacagccattgcactgatgtttactgtacttgctccattcttcaatcccatcatttatagcctgagaaacaaggacatgaacaatgcaattaaaaaactgttctgtcttcaaaaagtgttgaacaagcctggaggttaa

SEQ ID NO: 498 - protein, 331 aa, Homo sapiens
MCWTMPSPFTGSSTRNMESRNQSTVTEFIFTGFPQLQDGSLLYFFPLLFIYTFIIIDNLLIFSAVRLDTHLHNPMYNFISIFSFLEIWYTTATIPKMLSNLISEKKAISMTGCILQMYFFHSLENSEGILLTTMAIDRYVAICNPLRYQMIMTPRLCAHLSAGSCLFGFLILLPEIVMISTLPFCGPNQIHQIFCDLVPVLSLACTDTSMILIEDVIHAVTIIITFLIIALSYVRIVTVILRIPSSEGRQKAFSTCAGHLMVFLIFFGSVSLMYLRFSNTYPPVLDTAIALMFTVLAPFFNPIIYSLRNKDMNNAIKKLFCLQKVLNKPGG

SEQ ID NO: 499 - DNA, 954 bp, Homo sapiens
  CDS (1)..(954)
atggatcaatacaaccattcaagcctggctgaatttgtgttccttggctttgccagtgtgggctatgtcaggggctggctttttgtcctgctgctattggcatacctgttcaccatctgtggtaacatgctcatcttctcagtcatccgactggatgcagctctgcacacacctatgtaccactttgtcagtgttctttccttcttggagttgtggtatacagctaccactatccctaagatgttgtctaatattctcagtgagaagaaaaccatttcttttgcaggatgcctccttcagacctacttcttccactccttgggagcgtctgaatgctaccttcttacagccatggcctatgatagatacctggccatttgtcggcccctccactaccctataattatgaccaccacactctgtgccaagatggctgctgcttgttggacttgtggcttcctgtgtcccatttctgaggtcatccttgcctcccagctcccattttgtgcttacaatgaaatccaacacattttctgtgactttccacctttgctgagcttggcctgcaaggacacatctgctaacattctggtggactttgccattaatgctttcataattcttatcactttcttctttatcatgatttcttatgcaaggatcattggggctgtgctgaagataaaaacagcatcaggaagaaagaaggccttttctacctgtgcctcacatcttgctgtggtcctcatcttctttgggagcatcatcttcatgtatgtgcggctaaagaagagctattccctgacccttgaccgaacacttgctatagtttactccgtactaacaccaatggtcaatccaattatctacagtcttcgtaacaaggaaatcattaaagctatcaagaggaccatcttccagaagggagataaagctagtcttgctcatctttga

SEQ ID NO: 500 - protein, 317 aa, Homo sapiens
MDQYNHSSLAEFVFLGFASVGYVRGWLFVLLLLAYLFTICGNMLIFSVIRLDAALHTPMYHFVSVLSFLELWYTATTIPKMLSNILSEKKTISFAGCLLQTYFFHSLGASECYLLTAMAYDRYLAICRPLHYPIIMTTTLCAKMAAACWTCGFLCPISEVILASQLPFCAYNEIQHIFCDFPPLLSLACKDTSANILVDFAINAFIILITFFFIMISYARIIGAVLKIKTASGRKKAFSTCASHLAVVLIFFGSIIFMYVRLKKSYSLTLDRTLAIVYSVLTPMVNPIIYSLRNKEIIKAIKRTIFQKGDKASLAHL

SEQ ID NO: 501 - DNA, 801 bp, Homo sapiens
  CDS (1)..(801)
atgtactatttcctcagccacctggcctttgttgacctttgttactcctctgctattacaccgaagatgatggtgaattttgttgtggaacgcaacaccattcctttccatgcttgtgcaacccaactgggttgttttctcaccttcatgatcactgagtgtttccttctagcctccatggcctacgattgctatgtcgccatctgtagtcccctgcattattcaacactgatgtcaagaagagtctgcattcaactggtggcagttccatatatatacagcttcctggttgccctcttccacaccgttatcactttccgtctgacttactgtggcccaaacttaattaaccatttctattgtgatgacctccccttcttagctctgtcctgctcagacacacacatgaaggaaattctgatatttgcctttgctggctttgatatgatctcttcctcttccattgtcctcacctcctacatctttattattgccgctatcctaaggatccgctctactcaggggcaacacaaagccatttccacctgtggctcccatatggtgactgtcactattttctatggcacactgatctttatgtacctacagcccaaatcaaatcactccttggacacagacaagatggcttctgtattttacacagtggtgatccccatgttaaaccccctaatctatagtctaaggaacaaagaagtgaaagatgcctcaaagaaagccttggataaaggttgtgaaaacttacagatattaacatttttaaaaataagaaaactttattaa

SEQ ID NO: 502 - protein, 266 aa, Homo sapiens [sequence omitted]

SEQ ID NO: 503 - DNA, 768 bp, Homo sapiens
  CDS (1)..(768)
atgtactttttcctgagcaacttatcctttgtggatctgtgcttctcttccaatgtgactccaaggatgctggagattttcctttcagagaagaaaagcatttcctatcctgcccgtcttgtgcagtgttacctttttatcaccttggtccacgttgagctctacatcctggctgtgatggcctttgaccggtacatggccatctgcaaccctctgctttatggcagcagaatgtccaagagcgtgtgctctttcctcatcacagtgctttatgtgtatggagcactcactggcctgatggagactatgtggacctacaacctagccttctgtggccccagtgaaattaatcacttctactgtgtggacccaccactgattaagctggcttgttctgacacctacaacaaggaggtgtcaatgtttgttgtggctggtttcaacttcacttatcctctccttatcatcctcatttcctatctctacatatttcctgccaccctaaggatctgctctacagaaggcaggcacaaagctttttctacctgtggctcccatctgacagccgttactattttctattcagctcttttcttcatgtatctcagacgtccatcagaagagtccatggagcaggggaaaatggtagctgtattttataccactgtaatccccatgttgaatcccatgatctacagtctgaggaacaaagatgtgaaagaggcattatgcaaagaactgttcaaaagaaaattgttttctaaataa

SEQ ID NO: 504 - protein, 255 aa, Homo sapiens [sequence omitted]

SEQ ID NO: 505 - DNA, 813 bp, Homo sapiens
  CDS (1)..(813)
  modified_base (39)..(138): a, t, c, g, other or unknown
atgggccttggggggaattacctggggggtttggggggnnnnnnnnnnnnnnnnnnnnnnnnnnnnnnnnnnnnnnnnnnnnnnnnnnnnnnnnnnnnnnnnnnnnnnnnnnnnnnnnnnnnnnnnnnnnnnnnnnnntccattctaggatgtgccttccagctacttttaatgacttccttctcagcaggagagatatttatcctcactgccatgtcctatgaccgctatgtagccatctgctgtcccctgaactacgaggtaatcatgaatactggagtctgtgtgttaatggcaagtgtttcctgggccattggagggctctttggtactgcgtacacagctggcacattttccatgcctttctgtggctccagtgtgattccacagtttttctgtgatgttccttcattactaaggatttcctgttctgaaacactaatggtaatttatgcaggtattggagttggtgcatgtttaagcatttcttgtttcatctgtattgtgatctcttacatttatatcttctccactgtactgaagatccctaccactaaaggtcagtccaaagctttttccacatgcttcccccatctcactgttttcactgtttttatcataactgcttattttgtttatcttaagccaccttcaaattcaccatctgttattgacaggctgctttctgtgatctacactgtgatgcctccagtatttaaccctgtaacctacagcctgcggaacaatgacatgaaatgtgctctgataaggttgctgcagaaaacatatggtcaggaggcttacttcatttaa

SEQ ID NO: 506 - protein, 270 aa, Homo sapiens
  MOD_RES (13)..(46): Variable amino acid
MGLGGNYLGGLGXXXXXXXXXXXXXXXXXXXXXXXXXXXXXXXXXXSILGCAFQLLLMTSFSAGEIFILTAMSYDRYVAICCPLNYEVIMNTGVCVLMASVSWAIGGLFGTAYTAGTFSMPFCGSSVIPQFFCDVPSLLRISCSETLMVIYAGIGVGACLSISCFICIVISYIYIFSTVLKIPTTKGQSKAFSTCFPHLTVFTVFIITAYFVYLKPPSNSPSVIDRLLSVIYTVMPPVFNPVTYSLRNNDMKCALIRLLQKTYGQEAYFI

SEQ ID NO: 507 - DNA, 882 bp, Homo sapiens
  CDS (1)..(882)
atgggattttcgaattcctgggatattcagattgtacatgctgctctattcttcctagtttacctggcagctgtcataggaaatctcctaatcatcatacttaccactctggatgttcacctccaaaccccaatgtatttctttttgagaaacttgtctttcttagatttttgttacatctctgtcacaattccaaaatctattgttagttccttgactcatgatacttccatttctttctttgggtgtgctctgcaagccttctttttcatggacttggcaactacggaggtagccatccttacagtgatgtcctatgaccgctatatggccatctgccggcctttacattatgaggtcatcataaaccaaggtgtctgtctgaggatgatggccatgtcgtggctcagtggggtgatctgtggattcatgcatgtgatagcaacattctcattaccattctgtgggcgcaatagaatacgtcaatttttctgtaatattccacagctcctaagcctcttagaccccaaagtaattaccattgagattggagtcatggtttttggtacaagtcttgtgataatctcctttgttgtaattactctctcctacatgtacattttttctgtcatcatgaggattccttctaaggagggtagatcaaaaacattttctacctgcattccacatcttgtggttgtaacactctttatgatatctggcagcattgcctatgtgaagccaatttcaaattctccccccgttctggatgttttcctgtctgcgttctacacagtcgtgcccccgaccctgaaccccgtcatctatagtctgaggaatagggacatgaaggcagccctgagaaggcagtgtggtccctga

SEQ ID NO: 508 - protein, 293 aa, Homo sapiens
MGFSNSWDIQIVHAALFFLVYLAAVIGNLLIIILTTLDVHLQTPMYFFLRNLSFLDFCYISVTIPKSIVSSLTHDTSISFFGCALQAFFFMDLATTEVAILTVMSYDRYMAICRPLHYEVIINQGVCLRMMAMSWLSGVICGFMHVIATFSLPFCGRNRIRQFFCNIPQLLSLLDPKVITIEIGVMVFGTSLVIISFVVITLSYMYIFSVIMRIPSKEGRSKTFSTCIPHLVVVTLFMISGSIAYVKPISNSPPVLDVFLSAFYTVVPPTLNPVIYSLRNRDMKAALRRQCGP

SEQ ID NO: 509 - DNA, 924 bp, Homo sapiens
  CDS (1)..(924)
atgaatcacagcgttgtaactgagttcattattctgggcctcaccaaaaagcctgaactccagggaattatcttcctcttttttctcattgtctatcttgtggcttttctcggcaacatgctcatcatcattgccaaaatctataacaacaccttgcatacgcccatgtatgttttccttctgacactggctgttgtggacatcatctgcacaacaagcatcataccgaagatgctggggaccatgctaacatcagaaaataccatttcatatgcaggctgcatgtcccagctcttcttgttcacatggtctctgggagctgagatggttctcttcaccaccatggcctatgaccgctatgtggccatttgtttccctcttcattacagtactgttatgaaccaccatatgtgtgtagccttgctcagcatggtcatggctattgcagtcaccaattcctgggtgcacacagctcttatcatgaggttgactttctgtgggccaaacaccattgaccacttcttctgtgagatacccccattgctggctttgtcctgtagccctgtaagaatcaatgaggtgatggtgtatgttgctgatattaccctggccataggggactttattcttacctgcatctcctatggttttatcattgttgctattctccgtatccgcacagtagaaggcaagaggaaggccttctcaacatgctcatctcatctcacagtggtgaccctttactattctcctgtaatctacacctatatccgccctgcttccagctatacatttgaaagagacaaggtggtagctgcactctatactcttgtgactcccacattaaacccgatggtgtacagcttccagaatagggagatgcaggcaggaattaggaaggtgtttgcatttctgaaacactag

SEQ ID NO: 510 - protein, 307 aa, Homo sapiens
MNHSVVTEFIILGLTKKPELQGIIFLFFLIVYLVAFLGNMLIIIAKIYNNTLHTPMYVFLLTLAVVDIICTTSIIPKMLGTMLTSENTISYAGCMSQLFLFTWSLGAEMVLFTTMAYDRYVAICFPLHYSTVMNHHMCVALLSMVMAIAVTNSWVHTALIMRLTFCGPNTIDHFFCEIPPLLALSCSPVRINEVMVYVADITLAIGDFILTCISYGFIIVAILRIRTVEGKRKAFSTCSSHLTVVTLYYSPVIYTYIRPASSYTFERDKVVAALYTLVTPTLNPMVYSFQNREMQAGIRKVFAFLKH

SEQ ID NO: 511 - DNA, 945 bp, Homo sapiens
  CDS (1)..(945)
atgaccaatcagacacagatgatggaattcttgcttgtgagatttactgagaattgggtgctcctgaggctgcatgctttgctcttctcactgatctacctcacggctgtgctgatgaatttagtcatcattctcctcatgattctggaccatcgtctccacatggcaatgtactttttcctccgacatttgtccttcttagacctgtgtctcatttctgccacagtccccaaatccatcctcaactctgtcgcctccactgactccatctccttcctggggtgtgtgttgcagctcttcttggtggtactgctggctggatcagagattggcatccttactgccatgtcctatgaccgctatgctgccatctgctgccccctacactgtgaggctgtcatgagcagagggctctgtgtccagttgatggctctgtcctggctcaacagaggggccttgggactcttgtacacagctggaacattctctctgaatttttatggctctgatgagctacatcagttcttctgcgatgtccctgccctactaaagctcacttgttctaaagaacatgccatcattagtgtcagtgtggccattggggtctgttatgcattttcatgtttagtttgcattgtagtttcctatgtgtacattttctctgctgtgttaaggatatcacagagacagagacaatccaaagccttttccaactgtgtgcctcacctcattgttgtcactgtgtttcttgtaacaggtgctgttgcttatttaaagccagggtctgatgcaccttctattctagacttgctggtgtctgtgttctattctgtcgcacctccaaccttgaaccctgttatctactgtctgaagaacaaggacattaaatccgctctgagtaaagtcctgtggaatgttagaagcagtggggtaatgaaaagatga

SEQ ID NO: 512 - protein, 314 aa, Homo sapiens
MTNQTQMMEFLLVRFTENWVLLRLHALLFSLIYLTAVLMNLVIILLMILDHRLHMAMYFFLRHLSFLDLCLISATVPKSILNSVASTDSISFLGCVLQLFLVVLLAGSEIGILTAMSYDRYAAICCPLHCEAVMSRGLCVQLMALSWLNRGALGLLYTAGTFSLNFYGSDELHQFFCDVPALLKLTCSKEHAIISVSVAIGVCYAFSCLVCIVVSYVYIFSAVLRISQRQRQSKAFSNCVPHLIVVTVFLVTGAVAYLKPGSDAPSILDLLVSVFYSVAPPTLNPVIYCLKNKDIKSALSKVLWNVRSSGVMKR

SEQ ID NO: 513 - DNA, 951 bp, Homo sapiens
  CDS (1)..(951)
atggagctctggaacttcaccttgggaagtggcttcattttggtggggattctgaatgacagtgggtctcctgaactgctctgtgctacaattacaatcctatacttgttggccctgatcagcaatggcctactgctcctggctatcaccatggaagcccggctccacatgcccatgtacctcctgcttgggcagctctctctcatggacctcctgttcacatctgttgtcactcccaaggcccttgcggactttctgcgcagagaaaacaccatctcctttggaggctgtgcccttcagatgttcctggcactgacaatgggtggtgctgaggacctcctactggccttcatggcctatgacaggtatgtggccatttgtcatcctctgacatacatgaccctcatgagctcaagagcctgctggctcatggtggccacgtcctggatcctggcatccctaagtgccctaatatataccgtgtataccatgcactatcccttctgcagggcccaggagatcaggcatcttctctgtgagatcccacacttgctgaaggtggcctgtgctgatacctccagatatgagctcatggtatatgtgatgggtgtgaccttcctgattccctctcttgctgctatactggcctcctatacacaaattctactcactgtgctccatatgccatcaaatgaggggaggaagaaagcccttgtcacctgctcttcccacctgactgtggttgggatgttctatggagctgccacattcatgtatgtcttgcccagttccttccacagcaccagacaagacaacatcatctctgttttctacacaattgtcactccagccctgaatccactcatctacagcctgaggaataaggaggtcatgcgggccttgaggagggtcctgggaaaatacatgctgccagcacactccacgctctag

SEQ ID NO: 514 - protein, 316 aa, Homo sapiens
MELWNFTLGSGFILVGILNDSGSPELLCATITILYLLALISNGLLLLAITMEARLHMPMYLLLGQLSLMDLLFTSVVTPKALADFLRRENTISFGGCALQMFLALTMGGAEDLLLAFMAYDRYVAICHPLTYMTLMSSRACWLMVATSWILASLSALIYTVYTMHYPFCRAQEIRHLLCEIPHLLKVACADTSRYELMVYVMGVTFLIPSLAAILASYTQILLTVLHMPSNEGRKKALVTCSSHLTVVGMFYGAATFMYVLPSSFHSTRQDNIISVFYTIVTPALNPLIYSLRNKEVMRALRRVLGKYMLPAHSTL

SEQ ID NO: 515 - DNA, 936 bp, Homo sapiens
  CDS (1)..(936)
atggaaaaccaatccagcatttctgaatttttcctccgaggaatatcagcgcctccagagcaacagcagtccctcttcggaattttcctgtgtatgtatcttgtcaccttgactgggaacctgctcatcatcctggccattggctctgacctgcacctccacacccccatgtactttttcttggccaacctgtcttttgttgacatgggtttaacgtcctccacagttaccaagatgctggtgaatatacagactcggcatcacaccatctcctatacgggttgcctcacgcaaatgtatttctttctgatgtttggtgatctagacagcttcttcctggctgccatggcgtatgaccgctatgtggccatttgccaccccctctgctactccacagtcatgaggccccaagtctgtgccctaatgcttgcattgtgctgggtcctcaccaatatcgttgccctgactcacacgttcctcatggctcggttgtccttctgtgtgactggggaaattgctcactttttctgtgacatcactcctgtcctgaagctgtcatgttctgacacccacatcaacgagatgatggtttttgtcttgggaggcaccgtactcatcgtcccctttttatgcattgtcacctcctacatccacattgtgccagctatcctgagggtccgaacccgtggtggggtgggcaaggccttttccacctgcagttcccacctctgcgttgtttgtgtgttctatgggaccctcttcagtgcctacctgtgtcctccctccattgcctctgaagagaaggacattgcagcagctgcaatgtacaccatagtgactcccatgttgaacccctttatctatagcctaaggaacaaggacatgaagggggccctaaagaggctcttcagtcacaggagtattgtttcctcttag

SEQ ID NO: 516 - protein, 311 aa, Homo sapiens
MENQSSISEFFLRGISAPPEQQQSLFGIFLCMYLVTLTGNLLIILAIGSDLHLHTPMYFFLANLSFVDMGLTSSTVTKMLVNIQTRHHTISYTGCLTQMYFFLMFGDLDSFFLAAMAYDRYVAICHPLCYSTVMRPQVCALMLALCWVLTNIVALTHTFLMARLSFCVTGEIAHFFCDITPVLKLSCSDTHINEMMVFVLGGTVLIVPFLCIVTSYIHIVPAILRVRTRGGVGKAFSTCSSHLCVVCVFYGTLFSAYLCPPSIASEEKDIAAAAMYTIVTPMLNPFIYSLRNKDMKGALKRLFSHRSIVSS

SEQ ID NO: 517 - DNA, 936 bp, Homo sapiens
  CDS (1)..(936)
atgggaagtttcaacaccagttttgaagatggcttcattttggtgggattctcagattggccgcaactggagcccatcctgtttgtctttatttttattttctactccctaactctctttggcaacaccatcatcatcgctctctcctggctagaccttcggctgcacacacctatgtacttctttctctctcatctgtccctcctggacctctgcttcaccaccagcaccgtgccccagctcctgatcaacctttgcggggtggaccgcaccatcacccgtggagggtgtgtggctcagctcttcatctacctagccctgggctccacagagtgtgtgctcctggtggtgatggcctttgaccgctatgctgctgtctgtcgtccactccactacatggccatcatgcacccccatctctgccagaccctggctatcgcctcctggggtgcgggtttcgtgaactctctgatccagacaggtctcgcaatggccatgcctctctgtggccatcgactgaatcacttcttctgtgagatgcctgtatttctgaagttggcttgtgcggacacagaaggaacagaggccaagatgtttgtggcccgagtcatagtcgtggctgttcctgcagcacttattctaggctcctatgtgcacattgctcatgcagtgctgagggtgaagtcaacggctgggcgcagaaaggcttttgggacttgtgggtcccacctcctagtagttttccttttttatggctcagccatctacacatatctccaatccatccacaattattctgagcgtgagggaaaatttgttgcccttttttatactataattacccccattctcaatcctctcatttatacactaagaaacaaggacgtgaagggggctctgtggaaagtactatggaggggcagggactcagggtag

SEQ ID NO: 518 - protein, 311 aa, Homo sapiens
MGSFNTSFEDGFILVGFSDWPQLEPILFVFIFIFYSLTLFGNTIIIALSWLDLRLHTPMYFFLSHLSLLDLCFTTSTVPQLLINLCGVDRTITRGGCVAQLFIYLALGSTECVLLVVMAFDRYAAVCRPLHYMAIMHPHLCQTLAIASWGAGFVNSLIQTGLAMAMPLCGHRLNHFFCEMPVFLKLACADTEGTEAKMFVARVIVVAVPAALILGSYVHIAHAVLRVKSTAGRRKAFGTCGSHLLVVFLFYGSAIYTYLQSIHNYSEREGKFVALFYTIITPILNPLIYTLRNKDVKGALWKVLWRGRDSG

SEQ ID NO: 519 - DNA, 894 bp, Homo sapiens
  CDS (1)..(894)
atgctagtgtcacaacaggagcagcctcttctgtttggcatcttccttggcatgtacctggtcaccatggtggggaacctgctcattatcctggccatcagctctgacccacacctccatactcccatgtacttctttctggccaacctgtcattaactgatgcctgtttcacttctgcctccatccccaaaatgctggccaacattcatacccagagtcagatcatctcgtattctgggtgtcttgcacagctatatttcctccttatgtttggtggccttgacaactgcctgctggctgtgatggcatatgaccgctatgtggccatctgccaaccactccattacagcacatctatgagtccccagctctgtgcactaatgctgggtgtgtgctgggtgctaaccaactgtcctgccctgatgcacacactgttgctgacccgcgtggctttctgtgcccagaaagccatccctcatttctattgtgatcctagtgctctcctgaagcttgcctgctcagatacccatgtaaacgagctgatgatcatcaccatgggcttgctgttcctcactgttcccctcctgctgatcgtcttctcctatgtccgcattttctgggctgtgtttgtcatctcatctcctggagggagatggaaggccttctctacctgtggttctcatctcacggtggttctgctcttctatgggtctcttatgggtgtgtatttacttcctccatcaacttactctacagagagggaaagtagggctgctgttctctatatggtgattattcccacgctaaacccattcatttatagcttgaggaacagagacatgaaggaggctttgggtaaactttttgtcagtggaaaaacattctttttatga

SEQ ID NO: 520 - protein, 297 aa, Homo sapiens
MLVSQQEQPLLFGIFLGMYLVTMVGNLLIILAISSDPHLHTPMYFFLANLSLTDACFTSASIPKMLANIHTQSQIISYSGCLAQLYFLLMFGGLDNCLLAVMAYDRYVAICQPLHYSTSMSPQLCALMLGVCWVLTNCPALMHTLLLTRVAFCAQKAIPHFYCDPSALLKLACSDTHVNELMIITMGLLFLTVPLLLIVFSYVRIFWAVFVISSPGGRWKAFSTCGSHLTVVLLFYGSLMGVYLLPPSTYSTERESRAAVLYMVIIPTLNPFIYSLRNRDMKEALGKLFVSGKTFFL

SEQ ID NO: 521 - DNA, 945 bp, Homo sapiens
  CDS (1)..(945)
atggacaacagcaactggaccagtgtgtcccattttgttctcttgggcatttccacccacccagaagagcaaatcccactcttccttgttttctcactcatgtacgcaatcaatatttctggcaacttggccatcatcacactgattctctctgctccacgcctccacatccccatgtacatcttcctcagtaacttggccttgacagacatctgcttcacctccaccacggtccccaagatgctgcagattattttctcccctacaaaggtaatttcctacacaggctgtttagcccaaacttatttcttcatttgcttcgccgtcatggaaaacttcatcctggctgtgatggcctatgacaggtacattgccatctgccaccctttccactacactatgatcctgactagaatgctgtgtgtgaagatggtggtcatgtgccatgctctctcccaccttcatgccatgctgcatacctttctcataggccaactaatcttctgtgcagataacagaatcccccacttcttctgtgacctctacgctctgatgaagatctcctgcaccagcacctacctcaacacccttatgattcacacagaaggtgctgttgtaatcagtggagctctggccttcattactgcctcctatgcctgcatcatcctggtggtcctccggatcccctcagccaagggcaggtggaaaaccttttctacctgcggctcccacctcactgtggtggccatattctatggcaccctcagttgggtctacttccggcccctttccagctattcagtgaccaagggtcgcattataacagtcgtgtacacagtggtgactcccatgctgaaccccttcatctacagcctgaggaatggggatgtcaagggaggcttcatgaaatggatgagcagaatgcagacttttttctttagataa

SEQ ID NO: 522 - protein, 314 aa, Homo sapiens
MDNSNWTSVSHFVLLGISTHPEEQIPLFLVFSLMYAINISGNLAIITLILSAPRLHIPMYIFLSNLALTDICFTSTTVPKMLQIIFSPTKVISYTGCLAQTYFFICFAVMENFILAVMAYDRYIAICHPFHYTMILTRMLCVKMVVMCHALSHLHAMLHTFLIGQLIFCADNRIPHFFCDLYALMKISCTSTYLNTLMIHTEGAVVISGALAFITASYACIILVVLRIPSAKGRWKTFSTCGSHLTVVAIFYGTLSWVYFRPLSSYSVTKGRIITVVYTVVTPMLNPFIYSLRNGDVKGGFMKWMSRMQTFFFR

SEQ ID NO: 523 - DNA, 843 bp, Homo sapiens
  CDS (1)..(843)
  modified_base (772): a, t, c, g, other or unknown
  modified_base (778): a, t, c, g, other or unknown
atgtacctgaccacggtgctggggaacctgctcatcatgctgctcatccagctggactctcaccttcacacccccatgtacttcttcctcagccacttggctctcacttatttttccttttcatctgtcactgtccctaagatgctgatggacatgcggactaagtacaaatcgatcctctatgaggaatgcatttctcagatgtatttttttatattttttactgacctggacagcttccttattacatcaatggcatatgaccgatatgttgccatatgtcaccctctccactacactgtcatcatgagggaagagctctgtgtcttcttagtggctgtatcttggattctgtcttgtgccagctccctctctcacacccttctcctgacccggctgtctttctgtgctgcgaacaccatcccccatgtcttctgtgaccttgctgccctgctcaagctgtcctgctcagatatcttcctcaatgagctggtcatgttcacagtaggggtggtggtcattaccctgccattcatgtgtatcctggtatcatatggctacattggggccaccatcctgagggtcccttcaaccaaagggatccacaaagcattgtccacatgtggctcccatctctctgtggtgtctctctattatgggtcaatatttggccagtaccttttcccgactgtaagcagttctattgacaaggatgtcattgtggctctcatgtacacggtggtcacacccatgttgaacccctttatctacngcattnggaacagggacatgaaagaggcccttgggaaactcttcagtagagcaacatttttctcttggtga

SEQ ID NO: 524 - protein, 280 aa, Homo sapiens
  MOD_RES (258): Variable amino acid
  MOD_RES (260): Variable amino acid
MYLTTVLGNLLIMLLIQLDSHLHTPMYFFLSHLALTYFSFSSVTVPKMLMDMRTKYKSILYEECISQMYFFIFFTDLDSFLITSMAYDRYVAICHPLHYTVIMREELCVFLVAVSWILSCASSLSHTLLLTRLSFCAANTIPHVFCDLAALLKLSCSDIFLNELVMFTVGVVVITLPFMCILVSYGYIGATILRVPSTKGIHKALSTCGSHLSVVSLYYGSIFGQYLFPTVSSSIDKDVIVALMYTVVTPMLNPFIYXIXNRDMKEALGKLFSRATFFSW

SEQ ID NO: 525 - DNA, 975 bp, Homo sapiens
  CDS (1)..(975)
atgggaatgtccaacctgacaagactctctgaatttattctcttgggactctcctctcggtctgaagaccagaggccactctttgccctctttcttatcatatacctggtcactttgatgggaaatctgctcatcatcttggctatccactctgatcctcgacttcaaaaccctatgtattttttcctaagcatcttgtcctttgctgatatttgctacacaacagtcatagtcccaaagatgctcgtgaacttcttatcagagaaaaagaccatttcctatgctgaatgtctggcacagatgtatttcttcctggtttttggaaacatagatagttatctcctggcggctatggccatcaaccgctgtgtagccatttgtaacccattccattatgtcactgttatgaaccgcagatgctgtgtgttgctactagcattccccatcactttctcctatttccactctctcctacatgtcctcctggtgaatcggctcaccttttgtacatcaaatgttatccatcattttttttgtgatgtcaaccctgtgctgaaactgtcctgctcctccacctttgtcaatgaaattgtggccatgacagaagggctggcctctgtgatggctccatttgtctgtatcatcatctcttatctaagaattctcatcgctgttctcaagattccctcagcagctggaaaacacaaagccttctccacctgcagctcccatctcactgtggtgattctgttttatgggagtattagctatgtctatttgcagcctttgtccagctatactgtcaaggaccgaatagcaacaatcaactacactgtgttgacatcagtgttgaacccatttatctacagtttaagaaacaaagacatgaaacggggcttacagaaattgataaacaagattaagtctcaaatgagtaggttctctacaaagaccaataaaatctgtggaccctga

SEQ ID NO: 526 - protein, 324 aa, Homo sapiens
MGMSNLTRLSEFILLGLSSRSEDQRPLFALFLIIYLVTLMGNLLIILAIHSDPRLQNPMYFFLSILSFADICYTTVIVPKMLVNFLSEKKTISYAECLAQMYFFLVFGNIDSYLLAAMAINRCVAICNPFHYVTVMNRRCCVLLLAFPITFSYFHSLLHVLLVNRLTFCTSNVIHHFFCDVNPVLKLSCSSTFVNEIVAMTEGLASVMAPFVCIIISYLRILIAVLKIPSAAGKHKAFSTCSSHLTVVILFYGSISYVYLQPLSSYTVKDRIATINYTVLTSVLNPFIYSLRNKDMKRGLQKLINKIKSQMSRFSTKTNKICGP

SEQ ID NO: 527 - DNA, 942 bp, Homo sapiens
  CDS (1)..(942)
atgaagagggagaatcagagcagtgtgtctgagttcctcctcctggacctccccatctggccagagcagcaggctgtgttcttcaccctgttcttgggcatgtacctgatcacggtgctggggaacctgctcatcatcctgctcatccggctggactctcaccttcacacccccatgttcttcttcctcagccacttggctctcactgacatctccctttcatctgtcactgtcccaaagatgttattaagcatgcaaactcaggatcaatccattctttatgcagggtgtgtaactcagatgtattttttcatatttttcactgatctagacaatttccttctcacttcaatggcatacgatcggtatgtggccatctgtcaccccctccgctacaccactatcatgaaagagggactgtgtaacttactagtcactgtgtcctggatcctctcctgtaccaatgccctgtctcacactctcctcctggcccagctgtccttttgtgctgacaacaccatcccccatttcttctgtgatcttgttgccctactcaagctctcatgctcagacatctccctcaatgagctggtcattttcacagtgggacaggcagtcattactctaccactaatatgcatcttgatctcttatggccacattggggtcaccatcctcaaggctccatctactaagggcatcttcaaagctttgtccacctgtggctctcacctctctgtggtgtctctgtattatggcacaattattggactgtattttctcccctcatccagtgcctccagtgacaaggacgtaattgcctctgtgatgtacacggtgatcaccccattgctgaatcccttcatttatagcctaaggaacagggacataaagggagccctggagagactcttcaacagggcaacagtcttatctcaatga

SEQ ID NO: 528 - protein, 313 aa, Homo sapiens
MKRENQSSVSEFLLLDLPIWPEQQAVFFTLFLGMYLITVLGNLLIILLIRLDSHLHTPMFFFLSHLALTDISLSSVTVPKMLLSMQTQDQSILYAGCVTQMYFFIFFTDLDNFLLTSMAYDRYVAICHPLRYTTIMKEGLCNLLVTVSWILSCTNALSHTLLLAQLSFCADNTIPHFFCDLVALLKLSCSDISLNELVIFTVGQAVITLPLICILISYGHIGVTILKAPSTKGIFKALSTCGSHLSVVSLYYGTIIGLYFLPSSSASSDKDVIASVMYTVITPLLNPFIYSLRNRDIKGALERLFNRATVLSQ

SEQ ID NO: 529 - DNA, 858 bp, Homo sapiens
  CDS (1)..(858)
atgtatgtggtcatccttctggggaatggtactctcattttaatcagcatcttggaccctcaccttcacacccctatgtacttctttctggggaacctctccttcttggacatctgctacaccaccacctctattccctccacgctagtgagcttcctttcagaaagaaagaccatttccctttctggctgtgcagtgcagatgttcctcagcttggccatggggacaacagagtgtgtgcttctgggcgtgatggcctttgaccgctatgtggctatctgcaaccctctgagatatcccatcatcatgagtaaggatgcctatgtacccatggcagctgggtcctggatcataggagctgtcaattctgcagtacaaacagtgtttgtggtacaattgcctttctgcaggaataacatcatcaatcatttcacctgtgaaattctagctgtcatgaaactggcctgtgctgacatctcaggcaatgagttcatcctgcttgtgaccacaacattgttcctattgacacctttgttattaattattgtctcttacacgttaatcattttgagcatcttcaaaattagctcttcggaggggagaagcaaaccttcctctacctgctcagctcgtctgactgtggtgataacattctgtgggaccatcttcctcatgtacatgaagcccaagtctcaagagacacttaattcagatgacttggatgccactgacaaacttatattcatattctacagggtgatgactcccatgatgaatcctttaatctacagtcttagaaacaaggatgtgaaggaggcagtaaaacacctactgagaagaaaaaattttaacaagtaa

SEQ ID NO: 530 - protein, 285 aa, Homo sapiens
MYVVILLGNGTLILISILDPHLHTPMYFFLGNLSFLDICYTTTSIPSTLVSFLSERKTISLSGCAVQMFLSLAMGTTECVLLGVMAFDRYVAICNPLRYPIIMSKDAYVPMAAGSWIIGAVNSAVQTVFVVQLPFCRNNIINHFTCEILAVMKLACADISGNEFILLVTTTLFLLTPLLLIIVSYTLIILSIFKISSSEGRSKPSSTCSARLTVVITFCGTIFLMYMKPKSQETLNSDDLDATDKLIFIFYRVMTPMMNPLIYSLRNKDVKEAVKHLLRRKNFNK

SEQ ID NO: 531 - DNA, 957 bp, Homo sapiens
  CDS (1)..(957)
atggacaagataaaccagacatttgtgagagaattcattcttctgggactctctggttaccccaaacttgagatcattttctttgctctgattctagttatgtacgtagtgattctaattggcaatggtgttctgatcatagcaagcatcttggattctcgtcttcacatgcccatgtacttcttcctgggcaacctctctttcctggatatctgctatacaacctcctccattccctcaacactggtgagcttaatctcaaagaaaagaaacatttccttctctggatgtgcagtgcagatgttctttgggtttgcaatggggtcaacagaatgtttcctccttggcatgatggcatttgatcgttatgtggccatctgtaaccctctgagataccccatcatcatgaacaaggtggtgtatgtactgctgacttctgtatcatggctttctggtggaatcaattcaactgtgcaaacatcacttgccatgcgatggcctttctgtgggaacaatattattaatcatttcttatgcgagatcttagctgtcctaaaattagcttgttctgatatatctgtcaatattgttaccctagcagtgtcaaatattgctttcctagttcttcctctgctcgtgatttttttctcctatatgttcatcctctacaccatcttgcgaacgaactcggccacaggaagacacaaggcattttctacatgctcagctcacctgactgtggtgatcatattttatggtaccatcttctttatgtatgcaaaacctaagtcccaggacctccttgggaaagacaacttgcaagctacagaggggcttgtttccatgttttatggggttgtgacccccatgttaaaccccataatctatagcttgagaaataaagatgtaaaagctgctataaaatatttgctgagcaggaaagctattaaccagtaa

SEQ ID NO: 532 - protein, 318 aa, Homo sapiens
MDKINQTFVREFILLGLSGYPKLEIIFFALILVMYVVILIGNGVLIIASILDSRLHMPMYFFLGNLSFLDICYTTSSIPSTLVSLISKKRNISFSGCAVQMFFGFAMGSTECFLLGMMAFDRYVAICNPLRYPIIMNKVVYVLLTSVSWLSGGINSTVQTSLAMRWPFCGNNIINHFLCEILAVLKLACSDISVNIVTLAVSNIAFLVLPLLVIFFSYMFILYTILRTNSATGRHKAFSTCSAHLTVVIIFYGTIFFMYAKPKSQDLLGKDNLQATEGLVSMFYGVVTPMLNPIIYSLRNKDVKAAIKYLLSRKAINQ

SEQ ID NO: 533 - DNA, 858 bp, Homo sapiens
  CDS (1)..(858)
atgtatgtggtcatccttctggggaatggtactctcattttaatcagcatcttggaccctcaccttcacacccctatgtacttctttctggggaacctctccttcttggacatctgctacaccaccacctctattccctccacgctagtgagcttcctttcagaaagaaagaccatttccctttctggctgtgcagtgcagatgttcctcggcttggccatggggacaacagagtgtgtgcttctgggcatgatggcctttgaccgctatgtggctatctgcaaccctctgagatatcccatcatcatgagtaaggatgcctatgtacccatggcagctgggtcctggatcataggagctgtcaattctgcagtacaatcagtgtttgtggtacaattgcctttctgcaggaataacatcatcaatcatttcacctgtgaaattctggctgtcatgaaactggcctgtgctgacatctcagacaatgagttcatcatgcttgtggccacaacattgttcatattgacacctttgttattaatcattgtctcttacacgttaatcattgtgagcatcttcaaaattagctcttccgaggggagaagcaaagcttcctctacctgttcagcccatctgactgtggtcataatattctatgggaccatcctcttcatgtacatgaagcccaagtctaaagagacacttaattcggatgacttggatgctaccgacaaaattatatccatgttctatggggtgatgactcccatgatgaatcctttaatctacagtcttagaaacaaggatgtgaaagaggcagtaaaacacctactgaacagaaggttctttagcaagtga

SEQ ID NO: 534 - protein, 285 aa, Homo sapiens
MYVVILLGNGTLILISILDPHLHTPMYFFLGNLSFLDICYTTTSIPSTLVSFLSERKTISLSGCAVQMFLGLAMGTTECVLLGMMAFDRYVAICNPLRYPIIMSKDAYVPMAAGSWIIGAVNSAVQSVFVVQLPFCRNNIINHFTCEILAVMKLACADISDNEFIMLVATTLFILTPLLLIIVSYTLIIVSIFKISSSEGRSKASSTCSAHLTVVIIFYGTILFMYMKPKSKETLNSDDLDATDKIISMFYGVMTPMMNPLIYSLRNKDVKEAVKHLLNRRFFSK

SEQ ID NO: 535 - DNA, 1044 bp, Homo sapiens
  CDS (1)..(1044)
atgattgttcagttaatttgtactgtttgtttcttggcagtaaatacatttcatgttagatcttcttttgatttcctgaaagcagatgacatgggtgagattaaccagacacttgtgtcagaatttcttcttctgggtctttctggatacccaaagattgagattgtttactttgctctcattctagttatgtacctagtgattctaattggcaatggtgttctaatcatagccagcatctttgattctcattttcacacaccaatgtacttcttcctgggcaacctctctttcctggatatctgctatacatcctcctctgttccctcaacattggtgagcttaatctcaaagaaaagaaacatttccttctctggatgtgcagtgcagatgttctttgggtttgcaatggggtcaacagaatgtctgcttcttggcatgatggcatttgatcgttatgtggccatctgcaacccactgagataccccatcatcctgagcaaggtggcgtatgtattgatggcttctgtgtcctggctgtccggtggaataaattcagctgtgcaaacattacttgccatgagactgcctttctgtgggaataatattatcaatcatttcgcatgtgaaatattagctgtcctcaagctggcctgtgctgatatatccctcaatattatcaccatggtgatatcaaatatggccttcctggttcttccactgatggtcatttttttctcctatatgttcatcctctacaccatcttgcaaatgaattcagccacaggaagacgcaaggcattttccacgtgctcagctcacctgactgtggtgatcatattttacggtaccatcttctttatgtatgcgaaaccgaagtctcaagacctgattggggaagaaaaattgcaagcattagacaagctcatttctctgttttatggggtagtgacacccatgctgaatcctatactctatagcttgagaaataaggatgtaaaagctgctgtaaaatatttgctgaacaaaaaaccaattcactaa

SEQ ID NO: 536 - protein, 347 aa, Homo sapiens
MIVQLICTVCFLAVNTFHVRSSFDFLKADDMGEINQTLVSEFLLLGLSGYPKIEIVYFALILVMYLVILIGNGVLIIASIFDSHFHTPMYFFLGNLSFLDICYTSSSVPSTLVSLISKKRNISFSGCAVQMFFGFAMGSTECLLLGMMAFDRYVAICNPLRYPIILSKVAYVLMASVSWLSGGINSAVQTLLAMRLPFCGNNIINHFACEILAVLKLACADISLNIITMVISNMAFLVLPLMVIFFSYMFILYTILQMNSATGRRKAFSTCSAHLTVVIIFYGTIFFMYAKPKSQDLIGEEKLQALDKLISLFYGVVTPMLNPILYSLRNKDVKAAVKYLLNKKPIH

SEQ ID NO: 537 - DNA, 861 bp, Homo sapiens
  CDS (1)..(861)
atgtacctgatcaccttgctgggcaacatttttctgatctccatcaccattctagattcccacctgcacacccctatgtacctcttcctcagcaatctctcctttctggacatctggtactcctcttctgccctctctccaatgctggcaaactttgtttcagggagaaacactatttcattctcagggtgcgccactcagatgtacctctcccttgccatgggctccactgagtgtgtgctcctgcccatgatggcatatgaccggtatgtggccatctgcaaccccctgagataccctgtcatcatgaataggagaacctgtgtgcagattgcagctggctcctggatgacaggctgtctcactgccatggtggaaatgatgtctgtgctgccactgtctctctgtggtaatagcatcatcaatcatttcacttgtgaaattctggccatcttgaaattggtttgtgtggacacctccctggtgcagttaatcatgctggtgatcagtgtacttcttctccccatgccaatgctactcatttgtatctcttatgcatttatcctcgccagtatcctgagaatcagctcagtggaaggtcgaagtaaagccttttcaacgtgcacagcccacctgatggtggtagttttgttctatgggacggctctctccatgcacctgaagccctccgctgtagattcacaggaaatagacaaatttatggctttggtgtatgccggacaaacccccatgttgaatcctatcatctatagtctacggaacaaagaggtgaaagtggccttgaaaaaattgctgattagaaatcattttaatactgccttcatttccatcctcaaataa

SEQ ID NO: 538 - protein, 286 aa, Homo sapiens
MYLITLLGNIFLISITILDSHLHTPMYLFLSNLSFLDIWYSSSALSPMLANFVSGRNTISFSGCATQMYLSLAMGSTECVLLPMMAYDRYVAICNPLRYPVIMNRRTCVQIAAGSWMTGCLTAMVEMMSVLPLSLCGNSIINHFTCEILAILKLVCVDTSLVQLIMLVISVLLLPMPMLLICISYAFILASILRISSVEGRSKAFSTCTAHLMVVVLFYGTALSMHLKPSAVDSQEIDKFMALVYAGQTPMLNPIIYSLRNKEVKVALKKLLIRNHFNTAFISILK

SEQ ID NO: 539 - DNA, 963 bp, Homo sapiens
  CDS (1)..(963)
atggaaaggaccaacgattccacgtcgacagaatttttcctggtagggctttctgcccacccaaagctccagacagttttcttcgttctaattttgtggatgtacctgatgatcctgcttggaaatggagtccttatctcagttatcatctttgattctcacctgcacacccccatgtatttcttcctctgtaatctttccttcctcgacgtttgctacacaagttcctctgtcccactaattcttgccagctttctggcagtaaagaaaaaggtttccttctctgggtgtatggtgcaaatgtttatttcttttgccatgggggccacggagtgcatgatcttaggcacgatggcactggaccgctatgtggccatctgctacccactgagataccctgtcatcatgagcaagggtgcctatgtggccatggcagctgggtcctgggtcactgggcttgtggactcagtagtgcagacagcttttgcaatgcagttaccattctgtgctaataatgtcattaaacattttgtctgtgaaattctggctatcttgaaactggcctgtgctgatatttcaatcaatgtgattagtatgacagggtcgaatctgattgttctggttattccattgttagtaatttccatctcttacatatttattgttgccactattctgaggattccttccactgaaggaaaacataaggccttctccacctgctcagcccacctgacagtggtgattatattctatggaaccatcttcttcatgtacgcaaagcctgagtctaaagcctctgttgattcaggtaatgaagacatcattgaggccctcatctcccttttctatggagtgatgactcccatgcttaatcctctcatctatagtctgcgaaacaaggatgtaaaggctgctgtcaaaaacatactgtgtaggaaaaacttttctgatggaaaatga

SEQ ID NO: 540 - protein, 320 aa, Homo sapiens
MERTNDSTSTEFFLVGLSAHPKLQTVFFVLILWMYLMILLGNGVLISVIIFDSHLHTPMYFFLCNLSFLDVCYTSSSVPLILASFLAVKKKVSFSGCMVQMFISFAMGATECMILGTMALDRYVAICYPLRYPVIMSKGAYVAMAAGSWVTGLVDSVVQTAFAMQLPFCANNVIKHFVCEILAILKLACADISINVISMTGSNLIVLVIPLLVISISYIFIVATILRIPSTEGKHKAFSTCSAHLTVVIIFYGTIFFMYAKPESKASVDSGNEDIIEALISLFYGVMTPMLNPLIYSLRNKDVKAAVKNILCRKNFSDGK

SEQ ID NO: 541 - DNA, 978 bp, Homo sapiens
  CDS (1)..(978)
atgaagactttgtgttcctttcttcagatcagcagaaatatgcatcaagaaaaccaaaccaccatcactgaattcattctcctgggactctccaaccaggctgaacatcaaaacctcctctttgtgcttttcctgagtatgtatgtggtcactgtggttgggaacgggctcatcattgtggctatcagcttggatatataccttcacacccccatgtatctcttccttgcctacctatcctttgctgatatttcctccatttccaactcagtccccaaaatgctggtgaatattcaaaccaacagccaatccatctcttatgagagctgcatcacacagatgtacttttctattgtgtttgtcgtcactgacaatttgcttttggggaccatggccttcgaccactttgtggcgatctgccaccctctgaactatacaactttcatgcgggccaggttcggcactttgctcacagtcatctcgtggttcctcagtaatattattgctcttacacacacccttctgctcattcaattgctcttctgtgaccacaacactctcccacacttcttctgtgacttggcccctctgctcaaactgtcctgttcagatacaatgatcaatgagcttgtgttgtttattgtgggtttatcagttatcatcttcccctttgtactcatcttcttctcctatgtctgcatcatcagagctgtcctgggagtatcatccacacagggaaagtggaaagccttctccacttgtggctctcacctgacaattgcattactgttctacggaaccactgtaggcgtgtactttttcccctcctccactcaccctgaggacactgataagattggtgctgtcctattcactgtggtgacacccatgatgaaccccttcatctacagcttgaggaataaggatatgaaaggtgccctgagaaagctcatcaatagaaaaatttcttccctttga

SEQ ID NO: 542 - protein, 325 aa, Homo sapiens
MKTLCSFLQISRNMHQENQTTITEFILLGLSNQAEHQNLLFVLFLSMYVVTVVGNGLIIVAISLDIYLHTPMYLFLAYLSFADISSISNSVPKMLVNIQTNSQSISYESCITQMYFSIVFVVTDNLLLGTMAFDHFVAICHPLNYTTFMRARFGTLLTVISWFLSNIIALTHTLLLIQLLFCDHNTLPHFFCDLAPLLKLSCSDTMINELVLFIVGLSVIIFPFVLIFFSYVCIIRAVLGVSSTQGKWKAFSTCGSHLTIALLFYGTTVGVYFFPSSTHPEDTDKIGAVLFTVVTPMMNPFIYSLRNKDMKGALRKLINRKISSL

SEQ ID NO: 543 - DNA, 978 bp, Homo sapiens
  CDS (1)..(978)
atgaagacttttagttcctttcttcagatcggcagaaatatgcatcaaggaaaccaaaccaccatcactgaattcattctcctgggatttttcaagcaggatgagcatcaaaacctcctctttgtgcttttcttgggtatgtacctggtcactgtgattgggaacgggctcatcattgtggctatcagcttggatacgtaccttcatacccccatgtatctcttccttgccaatctatcctttgctgatatttcctccatttccaactcagtccccaaaatgctggtgaatattcaaaccaagagtcaatccatctcttatgagagctgcatcacacagatgtacttttctattgtgtttgtcgtcattgacaatttgctcttggggaccatggcctatgaccactttgtggcgatctgccaccctctgaattatacaattctcatgcggcccaggttcggcattttgctcacagtcatctcatggttcctcagtaatattattgctctgacacacacccttctgctcattcaattgctcttctgtaaccacaacactctcccacacttcttctgtgacttggcccctctgctcaaactgtcctgttcagatacattgatcaatgagcttgtgttgtttattgtgggtttatcagttatcatcttcccctttacactcagcttcttttcctatgtctgcatcatcagagctgtcctgagagtatcttccacacagggaaagtggaaagccttctccacttgtggctctcacctgacagttgtattactgttctacggaaccattgtaggcgtgtactttttcccctcctccactcaccctgaggacactgataagattggtgctgtcctattcactgtggtgacacccatgataaaccccttcatctacagcttgaggaataaggatatgaaaggtgccctgagaaagctcatcaatagaaaaatttcttccctttga

SEQ ID NO: 544 - protein, 325 aa, Homo sapiens
MKTFSSFLQIGRNMHQGNQTTITEFILLGFFKQDEHQNLLFVLFLGMYLVTVIGNGLIIVAISLDTYLHTPMYLFLANLSFADISSISNSVPKMLVNIQTKSQSISYESCITQMYFSIVFVVIDNLLLGTMAYDHFVAICHPLNYTILMRPRFGILLTVISWFLSNIIALTHTLLLIQLLFCNHNTLPHFFCDLAPLLKLSCSDTLINELVLFIVGLSVIIFPFTLSFFSYVCIIRAVLRVSSTQGKWKAFSTCGSHLTVVLLFYGTIVGVYFFPSSTHPEDTDKIGAVLFTVVTPMINPFIYSLRNKDMKGALRKLINRKISSL

SEQ ID NO: 545 - DNA, 960 bp, Homo sapiens
  CDS (1)..(960)
atgcctgtggggaaacttgtcttcaaccagtctgagcccactgagtttgtgttccgtgcgttcaccacagccactgaattccaggttcttctcttccttctcttcctcctcctctacttgatgatcctctgtggcaacacagccatcatctgggtggtgtgcacacacagcaccctccgcaccccgatgtatttcttcctgtccaacctgtctttcctggaactctgctacaccaccgtggtagtacccttgatgctttccaacattttgggggcccagaagcccatttcgttggctggatgtggggcccaaatgttcttctttgtcaccctcggcagcacggactgtttcctcttggcgatcatggcctatgaccgctatgtggctatctgccacccgctgcactacaccctcatcatgacccgcgagctgtgcacgcagatgctgggtggggccctgggcctggccctcttcccctccctgcagctcaccgccttaatcttcaccctgcccttttgcggccaccaccaggaaatcaaccacttcctctgcgatgtgcctcccgtcctgcgcctggcctgcgctgacatccgcgtgcaccaggctgtcctctatgtcgtgagcatcctcgtgctgaccatccccttcctgctcatctgcgtctcctacgtgttcatcacctgtgccatcctgagcatccgttctgccgagggccgccgccgggccttctccacctgctccttccacctcaccgtggtcctgctgcagtatggctgctgcagcctcgtgtacctgcgtcctcggtccagcacctcagaggatgaggacagccaaatcgcgttggtctacacctttgtcacccccttactcaaccctttgctttacagccttaggaacaaggatgtcaaaggtgctctgaggagtgccattatccgtaaagcagcctctgacgccaactga

SEQ ID NO: 546 - protein, 319 aa, Homo sapiens
MPVGKLVFNQSEPTEFVFRAFTTATEFQVLLFLLFLLLYLMILCGNTAIIWVVCTHSTLRTPMYFFLSNLSFLELCYTTVVVPLMLSNILGAQKPISLAGCGAQMFFFVTLGSTDCFLLAIMAYDRYVAICHPLHYTLIMTRELCTQMLGGALGLALFPSLQLTALIFTLPFCGHHQEINHFLCDVPPVLRLACADIRVHQAVLYVVSILVLTIPFLLICVSYVFITCAILSIRSAEGRRRAFSTCSFHLTVVLLQYGCCSLVYLRPRSSTSEDEDSQIALVYTFVTPLLNPLLYSLRNKDVKGALRSAIIRKAASDAN

SEQ ID NO: 547 - DNA, 933 bp, Homo sapiens
  CDS (1)..(933)
atggcagagatgaacctcaccttggtgaccgagttcctccttattgcattcactgaatatcctgaatgggcactccctctcttcctcttgtttttatttatgtatctcatcaccgtattggggaacttagagatgattattctgatcctcatggatcaccagctccacgctccaatgtatttccttctgagtcacctcgctttcatggacgtctgctactcatctatcactgtcccccagatgctggcagtgctgctggagcatggggcagctttatcttacacacgctgtgctgctcagttctttctgttcaccttctttggttccatcgactgctacctcttggccctcatggcctatgaccgctacttggctgtgtgccagcccctgctttatgtcaccatcctgacacagcaggcccgcttgagtcttgtggctggggcttacgttgctggtctcatcagtgccttggtgcggacagtctcagccttcactctctccttctgtggaaccagtgagattgactttattttctgtgacctccctcctctgttaaagttgacctgtggggagagctacactcaagaagtgctgattattatgtttgccatttttgtcatccctgcttccatggtggtgatcttggtgtcctacctgtttatcatcgtggccatcatggggatccctgctggaagccaggccaagaccttctccacctgcacctcccacctcactgctgtgtcactcttctttggtaccctcatcttcatgtacttgagaggtaactcagatcagtcttcggagaagaatcgggtagtgtctgtgctttacacagaggtcatccccatgttgaatcccctcatctacagcctgaggaacaaggaagtgaaggaggccctgagaaaaattctcaatagagccaagttgtcctaa

SEQ ID NO: 548 - protein, 310 aa, Homo sapiens
MAEMNLTLVTEFLLIAFTEYPEWALPLFLLFLFMYLITVLGNLEMIILILMDHQLHAPMYFLLSHLAFMDVCYSSITVPQMLAVLLEHGAALSYTRCAAQFFLFTFFGSIDCYLLALMAYDRYLAVCQPLLYVTILTQQARLSLVAGAYVAGLISALVRTVSAFTLSFCGTSEIDFIFCDLPPLLKLTCGESYTQEVLIIMFAIFVIPASMVVILVSYLFIIVAIMGIPAGSQAKTFSTCTSHLTAVSLFFGTLIFMYLRGNSDQSSEKNRVVSVLYTEVIPMLNPLIYSLRNKEVKEALRKILNRAKLS

SEQ ID NO: 549 - DNA, 927 bp, Homo sapiens
  CDS (1)..(927)
atggccatggacaatgtcacagcagtgtttcagtttctccttattggcatttctaactatcctcaatggagagacacgtttttcacattagtgctgataatttacctcagcacattgttggggaatggatttatgatctttcttattcactttgaccccaacctccacactccaatctacttcttccttagtaacctgtctttcttagacctttgttatggaacagcttccatgccccaggctttggtgcattgtttctctacccatccctacctctcttatccccgatgtttggctcaaacgagtgtctccttggctttggccacagcagagtgcctcctactggctgccatggcctatgaccgtgtggttgctatcagcaatcccctgcgttattcagtggttatgaatggcccagtatgtgtctgcttggttgctacctcatgggggacatcacttgtgctcactgccatgctcatcctatccctgaggcttcacttctgtggggctaatgtcatcaaccattttgcctgtgagattctctccctcattaagctgacctgttctgataccagcctcaatgaatttatgatcctcatcaccagtatcttcaccctgctgctaccatttgggtttgttctcctctcctacatacgaattgctatggctatcataaggattcgctcactccagggcaggctcaaggcctttaccacatgtggctctcacctgaccgtggtgacaatcttctatgggtcagccatctccatgtatatgaaaactcagtccaagtcctaccctgaccaggacaagtttatctcagtgttttatggagctttgacacccatgttgaaccccctgatatatagcctgagaaaaaaagatgttaaacgggcaataaggaaagttatgttgaaaaggacatga

SEQ ID NO: 550 - protein, 308 aa, Homo sapiens
MAMDNVTAVFQFLLIGISNYPQWRDTFFTLVLIIYLSTLLGNGFMIFLIHFDPNLHTPIYFFLSNLSFLDLCYGTASMPQALVHCFSTHPYLSYPRCLAQTSVSLALATAECLLLAAMAYDRVVAISNPLRYSVVMNGPVCVCLVATSWGTSLVLTAMLILSLRLHFCGANVINHFACEILSLIKLTCSDTSLNEFMILITSIFTLLLPFGFVLLSYIRIAMAIIRIRSLQGRLKAFTTCGSHLTVVTIFYGSAISMYMKTQSKSYPDQDKFISVFYGALTPMLNPLIYSLRKKDVKRAIRKVMLKRT

SEQ ID NO: 551 - DNA, 975 bp, Homo sapiens
  CDS (1)..(975)
atgggcatggagggtcttctccagaactccactaacttcgtcctcacaggcctcatcacccatcctgccttccccgggcttctctttgcaatagtcttctccatctttgtggtggctataacagccaacttggtcatgattctgctcatccacatggactcccgcctccacacacccatgtacttcttgctcagccagctctccatcatggataccatctacatctgtatcactgtccccaagatgctccaggacctcctgtccaaggacaagaccatttccttcctgggctgtgcagttcagatcttcctctacctgaccctgattggaggggaattcttcctgctgggtctcatggcctatgaccgctatgtggctgtgtgcaaccctctacggtaccctctcctcatgaaccgcagggtttgcttattcatggtggtcggctcctgggttggtggttccttggatgggttcatgctgactcctgtcactatgagtttccccttctgtagatcccgagagatcaatcactttttctgtgagatcccagccgtgctgaagttgtcttgcacagacacgtcactctatgagaccctgatgtatgcctgctgcgtgctgatgctgcttatccctctatctgtcatctctgtctcctacacgcacatcctcctgactgtccacaggatgaactctgctgagggccggcgcaaagcctttgctacgtgttcctcccacattatggtggtgagcgttttctacggggcagccttctacaccaacgtgctgccccactcctaccacactccagagaaagataaagtggtgtctgccttctacaccatcctcacccccatgctcaacccactcatctacagcttgaggaataaagatgtggctgcagctctgaggaaagtactagggagatgtggttcctcccagagcatcagggtggcgactgtgatcaggaagggctag

SEQ ID NO: 552 - protein, 324 aa, Homo sapiens
MGMEGLLQNSTNFVLTGLITHPAFPGLLFAIVFSIFVVAITANLVMILLIHMDSRLHTPMYFLLSQLSIMDTIYICITVPKMLQDLLSKDKTISFLGCAVQIFLYLTLIGGEFFLLGLMAYDRYVAVCNPLRYPLLMNRRVCLFMVVGSWVGGSLDGFMLTPVTMSFPFCRSREINHFFCEIPAVLKLSCTDTSLYETLMYACCVLMLLIPLSVISVSYTHILLTVHRMNSAEGRRKAFATCSSHIMVVSVFYGAAFYTNVLPHSYHTPEKDKVVSAFYTILTPMLNPLIYSLRNKDVAAALRKVLGRCGSSQSIRVATVIRKG

SEQ ID NO: 553 - DNA, 1017 bp, Homo sapiens
  CDS (1)..(1017)
atgttttatgtaaatcagatacctttccaactttatcatatctctttcgtgtaccctacagagctatggagcagagcaattattccgtgtatgccgactttatccttctgggtttgttcagcaacgcccgtttcccctggcttctttgccctcattctcctggtctttgtgacctccatagccagcaacgtggtcaagatcattctcatccacatagactcccgcctccacacccccatgtacttcctgctcagccagctctccctcagggacatcctgtatatttccaccattgtgcccaaaatgctggtcgaccaggtgatgagccagagagccatttcctttgctggatgcactgcccaacacttcctctacttgaccttagcaggggctgagttcttcctcctaggactcatgtcctgtgatcgctacgtagccatctgcaaccctctgcactatcctgacctcatgagccgcaagatctgctggttgattgtggcggcagcctggctgggagggtctatcgatggtttcttgctcacccccgtcaccatgcagttccccttctgtgcctctcgggagatcaaccacttcttctgcgaggtgcctgcccttctgaagctctcctgcacggacacatcagcctacgagacagccatgtatgtctgctgtattatgatgctcctcatccctttctctgtgatctcgggctcttacacaagaattctcattactgtttataggatgagcgaggcagaggggaggcgaaaggctgtggccacctgctcctcacacatggtggttgtcagcctcttctatggggctgccatgtacacatacgtgctgcctcattcttaccacacccctgagcaggacaaagctgtatctgccttctacaccatcctcactcccatgctcaatccactcatttacagccttaggaacaaggatgtcacgggggccctacagaaggttgttgggaggtgtgtgtcctcaggaaaggtaaccactttctaa

SEQ ID NO: 554 - protein, 338 aa, Homo sapiens
MFYVNQIPFQLYHISFVYPTELWSRAIIPCMPTLSFWVCSATPVSPGFFALILLVFVTSIASNVVKIILIHIDSRLHTPMYFLLSQLSLRDILYISTIVPKMLVDQVMSQRAISFAGCTAQHFLYLTLAGAEFFLLGLMSCDRYVAICNPLHYPDLMSRKICWLIVAAAWLGGSIDGFLLTPVTMQFPFCASREINHFFCEVPALLKLSCTDTSAYETAMYVCCIMMLLIPFSVISGSYTRILITVYRMSEAEGRRKAVATCSSHMVVVSLFYGAAMYTYVLPHSYHTPEQDKAVSAFYTILTPMLNPLIYSLRNKDVTGALQKVVGRCVSSGKVTTF

SEQ ID NO: 555 - DNA, 1071 bp, Homo sapiens
  CDS (1)..(1071)
  modified_base (941)..(1040): a, t, c, g, other or unknown
atgtgctcagggaatcagacttctcagaatcaaacagcaagcactgatttcaccctcacgggactctttgctgagagcaagcatgctgccctcctctacaccgtgaccttccttcttttcttgatggccctcactgggaatgccctcctcatcctcctcatccactcagagccccgcctccacacccccatgtacttcttcatcagccagctcgcgctcatggatctcatgtacctatgcgtgactgtgcccaagatgcttgtgggccaggtcactggagatgataccatttccccgtcaggctgtgggatccagatgttcttctacctgaccctggctggagctgaggttttcctcctggctgccatggcctatgaccgatatgctgctgtttgcagacctctccattacccactgctgatgaaccagagggtgtgccagctcctggtgtcagcctgctgggttttgggaatggttgatggtttgttgctcacccccattaccatgagcttccccttttgccagtctaggaaaatcctgagttttttctgtgagactcctgccctgctgaagctctcctgctctgacgtctccctctataagacgctcatgtacctgtgctgcatcctcatgcttctcgcccccatcatggtcatctccagctcatacaccctcatcctgcatctcatccacaggatgaattctgccgccggccacaggaaggccttggccacctgctcctcccacatgatcatagtgctgctgctcttcggtgcttccttctacacctacatgctcccgagttcctaccacacagctgagcaggacatgatggtgtctgccttttacaccatcttcactcctgtgctgaaccccctcatttacagtctccgcaacaaagatgtcaccagggctatgaggagcatgatgcagtcaagaannnnnnnnnnnnnnnnnnnnnnnnnnnnnnnnnnnnnnnnnnnnnnnnnnnnnnnnnnnnnnnnnnnnnnnnnnnnnnnnnnnnnnnnnnnnnnnnnnnnttattgctcccattcatctcatcagatttaa

SEQ ID NO: 556 - protein, 356 aa, Homo sapiens
  MOD_RES (314)..(347): Variable amino acid
MCSGNQTSQNQTASTDFTLTGLFAESKHAALLYTVTFLLFLMALTGNALLILLIHSEPRLHTPMYFFISQLALMDLMYLCVTVPKMLVGQVTGDDTISPSGCGIQMFFYLTLAGAEVFLLAAMAYDRYAAVCRPLHYPLLMNQRVCQLLVSACWVLGMVDGLLLTPITMSFPFCQSRKILSFFCETPALLKLSCSDVSLYKTLMYLCCILMLLAPIMVISSSYTLILHLIHRMNSAAGHRKALATCSSHMIIVLLLFGASFYTYMLPSSYHTAEQDMMVSAFYTIFTPVLNPLIYSLRNKDVTRAMRSMMQSRXXXXXXXXXXXXXXXXXXXXXXXXXXXXXXXXXXYCSHSSHQI

SEQ ID NO: 557 - DNA, 843 bp, Homo sapiens
  CDS (1)..(843)
atggcgttgtctggaaatgctgtcctgatccttctgatacactgtgacgcccacctccacacccccatgtactttttcatcagtcaattgtctctcatggacatggcgtacatttctgtcactgtgcccaagatgctcctggaccaggtcatgggtgtgaataagatctcagcccctgagtgtgggatgcagatgttcttctacgtgacactagcaggttcagaatttttccttctagccaccatggcctatgaccgctacgtggccatctgccatcctctccgttaccctgtcctcatgaaccatagggtgtgtctcttcctgtcatcaggctgctggttcctgggctcagtggatggcttcacattcactcccatcaccatgaccttccccttccgtggatcccgggagattcatcatttcttctgtgaagttcctgctgtattgaatctctcctgctcagacacctcactctatgagattttcatgtacttgtgctgtgtcctcatgctcctcatccctgtggtgatcatttcaagctcctatttactcatcctcctcaccatccacgggatgaactcagcagagggccggaaaaaggcctttgccacctgctcctcccacctgactgtggtcatcctcttctatggggctgccatctacacctacatgctccccagctcctaccacacccctgagaaggacatgatggtatctgtcttctataccatcctcactccagtggtgaaccctttaatctatagtcttaggaataaggatgtcatgggggctctgaagaaaatgttaacagtggaacctgcctttcaaaaagctatggagtag

SEQ ID NO: 558 - protein, 280 aa, Homo sapiens
MALSGNAVLILLIHCDAHLHTPMYFFISQLSLMDMAYISVTVPKMLLDQVMGVNKISAPECGMQMFFYVTLAGSEFFLLATMAYDRYVAICHPLRYPVLMNHRVCLFLSSGCWFLGSVDGFTFTPITMTFPFRGSREIHHFFCEVPAVLNLSCSDTSLYEIFMYLCCVLMLLIPVVIISSSYLLILLTIHGMNSAEGRKKAFATCSSHLTVVILFYGAAIYTYMLPSSYHTPEKDMMVSVFYTILTPVVNPLIYSLRNKDVMGALKKMLTVEPAFQKAME

SEQ ID NO: 559 - DNA, 939 bp, Homo sapiens
  CDS (1)..(939)
atgcccaattcaaccaccgtgatggaatttctcctcatgaggttttctgatgtgtggacactacagattttacattctgcatccttctttatgttgtatttggtaactctaatgggaaacatcctcattgtgaccgtcaccacctgtgacagcagccttcacatgcccatgtacttcttcctcaggaatctgtctatcttggatgcctgctacatttctgttacagtccctacctcatgtgtcaattccctactggacagcaccaccatttctaaggcgggatgtgtagctcaggtcttcctcgtggttttttttgtatatgtggagcttctgtttctcaccattatggctcatgaccgctatgtggctgtctgccagccacttcactaccctgtgatcgtgaactctcgaatctgcatccagatgacactggcctccctactcagtggtcttgtctatgcaggcatgcacactggcagcacattccagctgcccttctgtcggtccaacgttattcatcaattcttctgtgacatcccctctctgctgaagctctcttgctctgacaccttcagcaatgaggtcatgattgttgtctctgctctgggggtaggtggcggctgtttcatctttatcatcaggtcttacattcacatcttttcgaccgtgctcgggtttccaagaggagcagacagaacaaaggccttttccacctgcatccctcacatcctggtggtgtcagtcttcctcagttcatgctcttctgtgtacctcaggccacctgcgatacctgcagccacccaggatctgatcctttctggtttttattccataatgcctcccctctttaaccctattatttacagtcttagaaataagcaaataaaggtggccatcaagaaaatcatgaagagaattttttattcagaaaatgtgtaa

SEQ ID NO: 560 - protein, 312 aa, Homo sapiens
MPNSTTVMEFLLMRFSDVWTLQILHSASFFMLYLVTLMGNILIVTVTTCDSSLHMPMYFFLRNLSILDACYISVTVPTSCVNSLLDSTTISKAGCVAQVFLVVFFVYVELLFLTIMAHDRYVAVCQPLHYPVIVNSRICIQMTLASLLSGLVYAGMHTGSTFQLPFCRSNVIHQFFCDIPSLLKLSCSDTFSNEVMIVVSALGVGGGCFIFIIRSYIHIFSTVLGFPRGADRTKAFSTCIPHILVVSVFLSSCSSVYLRPPAIPAATQDLILSGFYSIMPPLFNPIIYSLRNKQIKVAIKKIMKRIFYSENV

SEQ ID NO: 561 - DNA, 948 bp, Homo sapiens
  CDS (1)..(948)
atggccaacatcaccaggatggccaaccacactggaaagttggatttcatcctcatgggactcttcagacgatccaaacatccagctctacttagtgtggtcatctttgtggttttcctgaaggcgttgtctggaaatgctgtcctgatccttctgatacactgtgacgcccacctccacagccccatgtactttttcatcagtcaattgtctctcatggacatggcgtacatttctgtcactgtgcccaagatgctcctggaccaggtcatgggtgtgaataaggtctcagcccctgagtgtgggatgcagatgttcctctatctgacactagcaggttcggaatttttccttctagccaccatggcctatgaccgctacgtggccatctgccatcctctccgttaccctgtcctcatgaaccatagggtctgtcttttcctggcatcgggctgctggttcctgggctcagtggatggcttcatgctcactcccatcaccatgagcttccccttctgcagatcctgggagattcatcatttcttctgtgaagtccctgctgtaacgatcctgtcctgctcagacacctcactctatgagaccctcatgtacctatgctgtgtcctcatgctcctcatccctgtgacgatcatttcaagctcctatttactcatcctcctcaccgtccacaggatgaactcagcagagggccggaaaaaggcctttgccacctgctcctcccacctgactgtggtcatcctcttctatggggctgccgtctacacctacatgctccccagctcctaccacacccctgagaaggacatgatggtatctgtcttctataccatcctcactccggtgctgaaccctttaatctatagtcttaggaataaggatgtcatgggggctctgaagaaaatgttaactgtgagattcgtcctttag

SEQ ID NO: 562 - protein, 315 aa, Homo sapiens
MANITRMANHTGKLDFILMGLFRRSKHPALLSVVIFVVFLKALSGNAVLILLIHCDAHLHSPMYFFISQLSLMDMAYISVTVPKMLLDQVMGVNKVSAPECGMQMFLYLTLAGSEFFLLATMAYDRYVAICHPLRYPVLMNHRVCLFLASGCWFLGSVDGFMLTPITMSFPFCRSWEIHHFFCEVPAVTILSCSDTSLYETLMYLCCVLMLLIPVTIISSSYLLILLTVHRMNSAEGRKKAFATCSSHLTVVILFYGAAVYTYMLPSSYHTPEKDMMVSVFYTILTPVLNPLIYSLRNKDVMGALKKMLTVRFVL

SEQ ID NO: 563 - DNA, 939 bp, Homo sapiens
  CDS (1)..(939)
atggagccgctcaacagaacagaggtgtccgagttctttctgaaaggattttctggctacccagccctggagcatctgctcttccctctgtgctcagccatgtacctggtgaccctcctggggaacacagccatcatggcggtgagcgtgctagatatccacctgcacacgcccgtgtacttcttcctgggcaacctctctaccctggacatctgctacacgcccacctttgtgcctctgatgctggtccacctcctgtcatcccggaagaccatctcctttgctgtctgtgccatccagatgtgtctgagcctgtccacgggctccacggagtgcctgctactggccatcacggcctatgaccgctacctggccatctgccagccactcaggtaccacgtgctcatgagccaccggctctgcgtgctgctgatgggagctgcctgggtcctctgcctcctcaagtcggtgactgagatggtcatctccatgaggctgcccttctgtggccaccacgtggtcagtcacttcacctgcaagatcctggcagtgctgaagctggcatgcggcaacacgtcggtcagcgaagacttcctgctggcgggctccatcctgctgctgcctgtacccctggcattcatctgcctgtcctacttgctcatcctggccaccatcctgagggtgccctcggccgccaggtgctgcaaagccttctccacctgcttggcacacctggctgtagtgctgcttttctacggcaccatcatcttcatgtacttgaagcccaagagtaaggaagcccacatctctgatgaggtcttcacagtcctctatgccatggtcacgaccatgctgaaccccaccatctacagcctgaggaacaaggaggtgaaggaggccgccaggaaggtgtggggcaggagtcgggcctccaggtga

SEQ ID NO: 564 - protein, 312 aa, Homo sapiens
MEPLNRTEVSEFFLKGFSGYPALEHLLFPLCSAMYLVTLLGNTAIMAVSVLDIHLHTPVYFFLGNLSTLDICYTPTFVPLMLVHLLSSRKTISFAVCAIQMCLSLSTGSTECLLLAITAYDRYLAICQPLRYHVLMSHRLCVLLMGAAWVLCLLKSVTEMVISMRLPFCGHHVVSHFTCKILAVLKLACGNTSVSEDFLLAGSILLLPVPLAFICLSYLLILATILRVPSAARCCKAFSTCLAHLAVVLLFYGTIIFMYLKPKSKEAHISDEVFTVLYAMVTTMLNPTIYSLRNKEVKEAARKVWGRSRASR

SEQ ID NO: 565 - DNA, 942 bp, Homo sapiens
  CDS (1)..(942)
atggagcaagtcaataagactgtggtgagagagttcgtcgtcctcggcttctcatccctggccaggctgcagcagctgctctttgttatcttcctgctcctctacctgttcactctgggcaccaatgcaatcatcatttccaccattgtgctggacagagcccttcatactcccatgtacttcttccttgccatcctttcttgctctgagatttgctatacctttgtcattgtacccaagatgctggttgacctgctgtcccagaagaagaccatttctttcctgggctgtgccatccaaatgttttccttcctcttctttggctcctctcactccttcctgctggcagccatgggctatgatcgctatatggccatctgtaacccactgcgctactcagtgctcatgggacatggggtgtgtatgggactaatggctgctgcctgtgcctgtggcttcactgtctccctggtcaccacctccctagtatttcatctgcccttccactcctccaaccagctccatcacttcttctgtgacatctcccctgtccttaaactggcatctcagcactccggcttcagtcagctggtcatattcatgcttggtgtatttgccttggtcattcctctgctacttatcctagtctcctacatccgcatcatctctgccattctaaaaatcccttcctccgttggaagatacaagaccttctccacctgtgcctcccatctcattgtggtaactgttcactacagttgtgcctctttcatctacttaaggcccaagactaattacacttcaagccaagacaccctaatatctgtgtcatacaccatccttaccccattgttcaatccaatgatttatagtctgagaaataaggaattcaaatcagccctacgaagaacaatcggccaaactttctatcctcttagttaa

SEQ ID NO: 566 - protein, 313 aa, Homo sapiens
MEQVNKTVVREFVVLGFSSLARLQQLLFVIFLLLYLFTLGTNAIIISTIVLDRALHTPMYFFLAILSCSEICYTFVIVPKMLVDLLSQKKTISFLGCAIQMFSFLFFGSSHSFLLAAMGYDRYMAICNPLRYSVLMGHGVCMGLMAAACACGFTVSLVTTSLVFHLPFHSSNQLHHFFCDISPVLKLASQHSGFSQLVIFMLGVFALVIPLLLILVSYIRIISAILKIPSSVGRYKTFSTCASHLIVVTVHYSCASFIYLRPKTNYTSSQDTLISVSYTILTPLFNPMIYSLRNKEFKSALRRTIGQTFYPLS

SEQ ID NO: 567 - DNA, 927 bp, Homo sapiens
  CDS (1)..(927)
atggacacaggcaacaaaactctgccccaggactttctcttactgggctttcctggttctcaaactcttcagctctctctctttatgctttttctggtgatgtacatcctcacagttagtggtaatgtggctatcttgatgttggtgagcacctcccatcagttgcatacccccatgtacttctttctgagcaacctctccttcctggagatttggtataccacagcagcagtgcccaaagcactggccatcctactggggagaagtcagaccatatcatttacaagctgtcttttgcagatgtactttgttttctcattaggctgcacagagtacttcctcctggcagccatggcttatgaccgctgtcttgccatctgctatcctttacactacggagccatcatgagtagcctgctctcagcgcagctggccctgggctcctgggtgtgtggtttcgtggccattgcagtgcccacagccctcatcagtggcctgtccttctgtggcccccgtgccatcaaccacttcttctgtgacattgcaccctggattgccctggcctgcaccaacacacaggcagtagagcttgtggcctttgtgattgctgttgtggttatcctgagttcatgcctcatcacctttgtctcctatgtgtacatcatcagcaccatcctcaggatcccctctgccagtggccggagcaaagccttctccacgtgctcctcgcatctcaccgtggtgctcatttggtatgggtccacagttttccttcacgtccgcacctctatcaaagatgccttggatctgatcaaagctgtccacgtcctgaacactgtggtgactccagttttaaaccccttcatctatacgcttcgtaataaggaagtaagagagactctgctgaagaaatggaagggaaaataa

SEQ ID NO: 568 - protein, 308 aa, Homo sapiens
MDTGNKTLPQDFLLLGFPGSQTLQLSLFMLFLVMYILTVSGNVAILMLVSTSHQLHTPMYFFLSNLSFLEIWYTTAAVPKALAILLGRSQTISFTSCLLQMYFVFSLGCTEYFLLAAMAYDRCLAICYPLHYGAIMSSLLSAQLALGSWVCGFVAIAVPTALISGLSFCGPRAINHFFCDIAPWIALACTNTQAVELVAFVIAVVVILSSCLITFVSYVYIISTILRIPSASGRSKAFSTCSSHLTVVLIWYGSTVFLHVRTSIKDALDLIKAVHVLNTVVTPVLNPFIYTLRNKEVRETLLKKWKGK

SEQ ID NO: 569 - DNA, 1053 bp, Homo sapiens
  CDS (1)..(1053)
atgaatagtttgggaaagttggtctccatgatcctctcagctcatgtgttctgttattctaaatttaattgttttggatgtacccattccattcctgccttaggtgcggatccccctggagggatgggattgggcaatgagagttccctaatggatttcatccttctaggcttctcagaccaccctcgtctggaggctgttctctttgtatttgtccttttcttctacctcctgacccttgtgggaaacttcaccataatcatcatctcatatctggatccccctcttcataccccaatgtacttttttctcagcaacctctctttactggacatctgcttcactactagccttgctcctcagaccttagttaacttgcaaagaccaaagaagacgatcacttacggtggttgtgtggcgcaactctatatttctctggcactgggctccactgaatgtatcctcttggctgacatggccttggatcggtacattgctgtctgcaaacccctccactatgtagtcatcatgaacccacggctttgccaacagctggcatctatctcctggctcagtggtttggctagttccctaatccatgcaacttttaccttgcaattgcctctctgtggcaaccataggctggaccattttatttgcgaagtaccagctcttctcaagttggcttgtgtggacaccactgtcaatgaattggtgctttttgttgttagtgttctgtttgttgtcattccaccagcactcatctccatctcctatggcttcataactcaagctgtgctgaggatcaaatcagtagaggcaaggcataaagccttcagcacctgctcctcccaccttacagtggtgattatattctatggcaccataatctacgtgtacctgcaacctagtgacagctatgcccaggaccaagggaagtttatctccctcttctacaccatggtgacccccactttaaatcctatcatctatactttaaggaacaaggatatgaaagaggctctgaggaaacttctctcgggaaaattgtga

SEQ ID NO: 570 - protein, 350 aa, Homo sapiens
MNSLGKLVSMILSAHVFCYSKFNCFGCTHSIPALGADPPGGMGLGNESSLMDFILLGFSDHPRLEAVLFVFVLFFYLLTLVGNFTIIIISYLDPPLHTPMYFFLSNLSLLDICFTTSLAPQTLVNLQRPKKTITYGGCVAQLYISLALGSTECILLADMALDRYIAVCKPLHYVVIMNPRLCQQLASISWLSGLASSLIHATFTLQLPLCGNHRLDHFICEVPALLKLACVDTTVNELVLFVVSVLFVVIPPALISISYGFITQAVLRIKSVEARHKAFSTCSSHLTVVIIFYGTIIYVYLQPSDSYAQDQGKFISLFYTMVTPTLNPIIYTLRNKDMKEALRKLLSGKL

SEQ ID NO: 571 - DNA, 879 bp, Homo sapiens
  CDS (1)..(879)
atgagtgtaacagaaaatacgctcatgatcctcctcattcgcagtgactcccgactccacactccaatgtattttctgctcagccatctctccttaatggatatcttgcatgtttccaacatcgttcccaaaatggtcactaactttctgtcaggcagcagaactatttcatttgcaggttgtgggttccaggtatttctgtccctcaccctcctgggtggtgagtgccttctcctggctgcaatgtcctgtgatcgctatgtggctatctgtcacccgctgcgctatccgattcttatgaaggagtatgccagcgctctcatggctggaggctcctggctcattggggttttcaactccacagtccacacagcttatgcactgcagtttcccttctgtggctctagggcaattgatcacttcttctgtgaagtccctgccatgttgaagttgtcctgtgcagacacaacacgctatgaacgaggggtttgtgtaagtgctgtgatcttcctgctgatccctttctccttgatctctgcttcttatggccaaattattcttactgtcctccagatgaaatcatcagaggcaaggaaaaagtcattttccacttgttccttccacatgattgtggtcacgatgtactatgggccatttatttttacatatatgagacctaaatcataccacactccaggccaggataagttcctggcaatattctatacgatcctcacacccacactcaaccctttcatctacagctttaggaataaagatgttctggcggtgatgaaaaatatgctcaaaagtaactttctgcacaaaaaaatgaataggaaaattcctgaatgtgtgttctgtctatttctatgttaa

SEQ ID NO: 572 - protein, 292 aa, Homo sapiens
MSVTENTLMILLIRSDSRLHTPMYFLLSHLSLMDILHVSNIVPKMVTNFLSGSRTISFAGCGFQVFLSLTLLGGECLLLAAMSCDRYVAICHPLRYPILMKEYASALMAGGSWLIGVFNSTVHTAYALQFPFCGSRAIDHFFCEVPAMLKLSCADTTRYERGVCVSAVIFLLIPFSLISASYGQIILTVLQMKSSEARKKSFSTCSFHMIVVTMYYGPFIFTYMRPKSYHTPGQDKFLAIFYTILTPTLNPFIYSFRNKDVLAVMKNMLKSNFLHKKMNRKIPECVFCLFLC

SEQ ID NO: 573 - DNA, 963 bp, Homo sapiens
  CDS (1)..(963)
  modified_base (747)..(846): a, t, c, g, other or unknown
atgattctcctgattcactgggaccaccggttccacacgcccatgtacttcctcctgagccaactttccctcatggacgtgatgctggtttccaccactgtgcccaaaatggcggctgactacttgaccggaagtaaggccatctcccgcgctggctgtggtgcgcagatcttcttcctccccacactgggtggtggagagtgcttcctcttagcagccatggcctatgaccgctatgcggctgtctgccacccactccgatatcccactctcatgagctggcagctgtgcctgaggatgaacctgtcgtgttggctcctgggtgcagctgacgggctcctgcaggctgttgctaccctgagcttcccatattgcggtgcacacgagatcgatcacttcttctgcgagacccccgtgctggtgcgtttggcttgtgctgacacttcagtcttcgaaaacgccatgtacatctgctgtgtgttaatgctcctggtccccttttccctcatcctgtcctcctatggtctcatcctcgctgctgttctgcacatgcgctctacagaagcccgcaagaaggcctttgccacctgctcttcacatgtggctgtggtgggactcttttatggagctgccatttttacctatatgagacccaaatcccacaggtccactaaccacgacaaggttgtgtcagccttctatactatgttcacccctttactaaaccccctcatctacagtgtgaannnnnnnnnnnnnnnnnnnnnnnnnnnnnnnnnnnnnnnnnnnnnnnnnnnnnnnnnnnnnnnnnnnnnnnnnnnnnnnnnnnnnnnnnnnnnnnnnnnnttctatactatgttcaccccttttctaaaccccctcatctacagtgtccagaacagtgaggtgaagggagccctgacaaggtgtatgggtcggtgtgtggccttaagtcgtgaataa

SEQ ID NO: 574 - protein, 320 aa, Homo sapiens
  MOD_RES (249)..(282): Variable amino acid
MILLIHWDHRFHTPMYFLLSQLSLMDVMLVSTTVPKMAADYLTGSKAISRAGCGAQIFFLPTLGGGECFLLAAMAYDRYAAVCHPLRYPTLMSWQLCLRMNLSCWLLGAADGLLQAVATLSFPYCGAHEIDHFFCETPVLVRLACADTSVFENAMYICCVLMLLVPFSLILSSYGLILAAVLHMRSTEARKKAFATCSSHVAVVGLFYGAAIFTYMRPKSHRSTNHDKVVSAFYTMFTPLLNPLIYSVXXXXXXXXXXXXXXXXXXXXXXXXXXXXXXXXXXFYTMFTPFLNPLIYSVQNSEVKGALTRCMGRCVALSRE

SEQ ID NO: 575 - DNA, 939 bp, Homo sapiens
  CDS (1)..(939)
atggaaaattacaatcaaacatcaactgatttcatcttattggggctgtttccaccatcaataattgaccttttcttcttcattctcattgttttcattttcctgatggctctaattggaaacctgtccatgattcttctcatcttcttggacacccatctccacacacccatgtatttcctactgagtcagctctccctcattgacctaaattacatctccaccattgttcctaagatggcatctgattttctgcatggaaacaagtctatctccttcactgggtgtgggattcagagtttcttcttcttggcattaggaggtgcagaagcactacttttggcatctatggcctatgatcgttacattgctatttgctttcctctccactatctcatccgcatgagcaaaagagtgtgtgtgctgatgataacagggtcttggatcataggctcgatcaatgcttgtgctcacactgtatatgtactccatattccttattgccgatccagggccatcaatcatttcttctgtgatgtcccagcaatggtgactctggcctgcatggacacctgggtctatgagggcacagtgtttttgagtgccaccatctttctcgtgtttcccttcattggtatttcatgttcctatggccaggttctctttgctgtctaccacatgaaatctgcagaagggaggaagaaagcctatttgacctgcagcacccacctcactgtagtaactttctactatgcaccttttgtctacacttatctacgtccaagatccctgcgatctccaacagaggacaaggttctggctgtcttctacaccatcctcaccccaatgctcaaccccatcatctatagcctgaggaacaaggaggtgatgggggccctgacacgagtgagtcagagaatctgctctgtgaaaatgtag

SEQ ID NO: 576 - protein, 312 aa, Homo sapiens
MENYNQTSTDFILLGLFPPSIIDLFFFILIVFIFLMALIGNLSMILLIFLDTHLHTPMYFLLSQLSLIDLNYISTIVPKMASDFLHGNKSISFTGCGIQSFFFLALGGAEALLLASMAYDRYIAICFPLHYLIRMSKRVCVLMITGSWIIGSINACAHTVYVLHIPYCRSRAINHFFCDVPAMVTLACMDTWVYEGTVFLSATIFLVFPFIGISCSYGQVLFAVYHMKSAEGRKKAYLTCSTHLTVVTFYYAPFVYTYLRPRSLRSPTEDKVLAVFYTILTPMLNPIIYSLRNKEVMGALTRVSQRICSVKM

SEQ ID NO: 577 - DNA, 951 bp, Homo sapiens
  CDS (1)..(951)
atggaggctgccaatgagtcttcagagggaatctcattcgttttattgggactgacaacaagtcctggacagcagcggcctctctttgtgctgttcttgctcttgtatgtggccagcctcctgggtaatggactcattgtggctgccatccaggccagtccagcccttcatgcacccatgtacttcctgctggcccacctgtcctttgctgacctctgtttcgcctccgtcactgtgcccaagatgttggccaacttgttggcccatgaccactccatctcgctggctggctgcctgacccaaatgtacttcttctttgccctgggggtaactgatagctgtcttctggcggccatggcctatgactgctacgtggccatccggcaccccctcccctatgccacgaggatgtcccgggccatgtgcgcagccctggtgggaatggcatggctggtgtcccacgtccactccctcctgtatatcctgctcatggctcgcttgtccttctgtgcttcccaccaagtgccccacttcttctgtgaccaccagcctctcttaaggctctcgtgctctgacacccaccacatccagctgctcatcttcaccgagggcgccgcagtggtggtcactcccttcctgctcatcctcgcctcctatggggccatcgcagctgccgtgctccagctgccctcagcctctgggaggctccgggctgtgtccacctgtggctcccacctggctgtggtgagcctcttctatgggacagtcattgcagtctacttccaggccacatcccgacgcgaggcagagtggggccgtgtggccactgtcatgtacactgtagtcacccccatgctgaaccccatcatctacagcctctggaatcgcgatgtacagggggcactccgagcccttctcattgggcgaaggatctcagctagtgactcctga

SEQ ID NO: 578 - protein, 316 aa, Homo sapiens
MEAANESSEGISFVLLGLTTSPGQQRPLFVLFLLLYVASLLGNGLIVAAIQASPALHAPMYFLLAHLSFADLCFASVTVPKMLANLLAHDHSISLAGCLTQMYFFFALGVTDSCLLAAMAYDCYVAIRHPLPYATRMSRAMCAALVGMAWLVSHVHSLLYILLMARLSFCASHQVPHFFCDHQPLLRLSCSDTHHIQLLIFTEGAAVVVTPFLLILASYGAIAAAVLQLPSASGRLRAVSTCGSHLAVVSLFYGTVIAVYFQATSRREAEWGRVATVMYTVVTPMLNPIIYSLWNRDVQGALRALLIGRRISASDS

SEQ ID NO: 579 - DNA, 1026 bp, Homo sapiens
  CDS (1)..(1026)
atggccttgccattgctcttatctccctcctgctttgcctcttctcagtctctgtccagtaggatgaactcagagaacctcacccgggccgcggttgcccctgctgaattcgtcctcctgggcatcacaaatcgctgggacctgcgtgtggccctcttcctgacctgcctgcctgtctacctggtgagcctgctgggaaacatgggcatggcgctgctgatccgcatggatgcccggctccacacacctatgtacttcttcctggccaacctctccctgctggatgcctgctattcctccgccatcggccccaagatgctagtggacctgctgctgccccgagccaccatcccttacacagcctgtgccctccagatgtttgtctttgcaggtctggctgatactgagtgttgcttgctggcagccatggcctatgaccgctacgtggccatcagaaacccacttctctatacaacagctatgtcgcagcgtctatgcctggccttgctgggagcatcaggcctgggtggggcagtgagtgcctttgttcacacaaccctcaccttccgcctgagcttctgccgctcccggaagatcaatagcttcttctgcgatatccctccactgctggccatctcgtgcagtgacaccagtctcaatgaactccttctcttcgccatctgtggcttcatccagacagccacggtgttagctatcacggtgtcttatggcttcatcgctggggctgtgatccacatgcgctcggtcgagggcagtcggcgagcagcctccaccggtggttcccacctcacagccgtggccatgatgtacgggacactcattttcatgtacctgcgccccagctccagctatgccctggacactgacaagatggcctctgtgttctataccctggtcatcccgtctctcaacccactcatctacagcctccgcaataaggaggtcaaggaggccctcaggcagacctggagccgattccactgtccagggcaggggtcccagtga

SEQ ID NO: 580 - protein, 341 aa, Homo sapiens
MALPLLLSPSCFASSQSLSSRMNSENLTRAAVAPAEFVLLGITNRWDLRVALFLTCLPVYLVSLLGNMGMALLIRMDARLHTPMYFFLANLSLLDACYSSAIGPKMLVDLLLPRATIPYTACALQMFVFAGLADTECCLLAAMAYDRYVAIRNPLLYTTAMSQRLCLALLGASGLGGAVSAFVHTTLTFRLSFCRSRKINSFFCDIPPLLAISCSDTSLNELLLFAICGFIQTATVLAITVSYGFIAGAVIHMRSVEGSRRAASTGGSHLTAVAMMYGTLIFMYLRPSSSYALDTDKMASVFYTLVIPSLNPLIYSLRNKEVKEALRQTWSRFHCPGQGSQ

SEQ ID NO: 581 - DNA, 969 bp, Homo sapiens
  CDS (1)..(969)
atgagccctgagaaccagagcagcgtgtccgagttcctcctcctgggcctccccatccggccagagcagcaggccgtgttcttcgccctgttcctgggcatgtacctgaccacggtgctggggaacctgctcatcatgctgctcatccagctagactctcaccttcacacccccatgtacttcttccttagccacttggccctcactgacatctccttttcatctgtcactgtccctaagatgctgatgaacatgcagactcagcacctagccgtcttttacaagggatgcatttcacagacatattttttcatattttttgctgacttagacagtttccttatcacttcaatggcatatgacaggtatgtggccatctgtcatcctctacattatgccaccatcatgactcagagccagtgtgtcatgctggtggctgggtcctgggtcatcgcttgtgcgtgtgctcttttgcataccctcctcctggcccagctttccttctgtgctgaccacatcatccctcactacttctgtgaccttggtgccctgctcaagttgtcctgctcagacacctccctcaatcagttagcaatctttacagcagcattgacagccattatgcttccattcctgtgcatcctggtttcttatggtcacattggggtcaccatcctccagattccctctaccaagggcatatgcaaagccttgtccacttgtggatcccacctctcagtggtgactatctattatcggacaattattggtctctattttcttcccccatccagcaacaccaatgacaagaacataattgcttcagtgatatacacagcagtcactcccatgttgaacccattcatttacagtctgagaaataaagacattaagggagccctaagaaaactcttgagtaggtcaggcgcagtggctcatgcctgtaatctcaacactttgggaggctga

SEQ ID NO: 582 - protein, 322 aa, Homo sapiens
MSPENQSSVSEFLLLGLPIRPEQQAVFFALFLGMYLTTVLGNLLIMLLIQLDSHLHTPMYFFLSHLALTDISFSSVTVPKMLMNMQTQHLAVFYKGCISQTYFFIFFADLDSFLITSMAYDRYVAICHPLHYATIMTQSQCVMLVAGSWVIACACALLHTLLLAQLSFCADHIIPHYFCDLGALLKLSCSDTSLNQLAIFTAALTAIMLPFLCILVSYGHIGVTILQIPSTKGICKALSTCGSHLSVVTIYYRTIIGLYFLPPSSNTNDKNIIASVIYTAVTPMLNPFIYSLRNKDIKGALRKLLSRSGAVAHACNLNTLGG

SEQ ID NO: 583 - DNA, 1038 bp, Homo sapiens
  CDS (1)..(1038)
atgaatatcacactttattcatttctttatgtcctcagattaaatgaagggaatagtactggaagaaatatagatgaaagaaagaaaatgcaaggagaaaacttcaccatttggagcatttttttcttggagggattttcccagtacccagggttagaagtggttctcttcgtcttcagccttgtaatgtatctgacaacgctcttgggcaacagcactcttattttgatcactatcctagattcacgccttaaaacccccatgtacttattccttggaaatctctctttcatggatatttgttacacatctgcctctgttcctactttgctggtgaacttgctgtcatcccagaaaaccattatcttttctgggtgtgctgtacagatgtatctgtcccttgccatgggctccacagagtgtgtgctcctggccgtgatggcatatgaccgttatgtggccatttgtaacccgctgagatactccatcatcatgaacaggtgcgtctgtgcacggatggccacggtctcctgggtgacgggttgcctgaccgctctgctggaaaccagttttgccctgcagatacccctctgtgggaatctcatcgatcacttcacgtgtgaaattctggcggtgctaaagttagcttgcacaagttcactgctcatgaacaccatcatgctggtggtcagcattctcctcttgccaattccaatgctcttagtttgcatctcttacatcttcatcctttccactattctgagaatcacctcagcagagggaagaaacaaggctttttctacctgtggtgcccatttgactgtggtgattttgtattatggggctgccctctctatgtacctaaagccttcttcatcaaatgcacaaaaaatagacaaaatcatctcgttgctttacggagtgcttacccctatgttgaaccccataatttacagtttaagaaacaaggaagtcaaagatgctatgaagaaattgctgggcaaaataacattgcatcaaacacacgaacatctctga

SEQ ID NO: 584 - protein, 345 aa, Homo sapiens
MNITLYSFLYVLRLNEGNSTGRNIDERKKMQGENFTIWSIFFLEGFSQYPGLEVVLFVFSLVMYLTTLLGNSTLILITILDSRLKTPMYLFLGNLSFMDICYTSASVPTLLVNLLSSQKTIIFSGCAVQMYLSLAMGSTECVLLAVMAYDRYVAICNPLRYSIIMNRCVCARMATVSWVTGCLTALLETSFALQIPLCGNLIDHFTCEILAVLKLACTSSLLMNTIMLVVSILLLPIPMLLVCISYIFILSTILRITSAEGRNKAFSTCGAHLTVVILYYGAALSMYLKPSSSNAQKIDKIISLLYGVLTPMLNPIIYSLRNKEVKDAMKKLLGKITLHQTHEHL

SEQ ID NO: 585 - DNA, 924 bp, Homo sapiens
  CDS (1)..(924)
atgggccaacacaatctaacagtgctaactgaattcattctgatggaactcacaaggcggcctgagctgcagattcccctttttggagtcttcctcgtcatctacctaatcacagtggtgggcaacctaactatgatcattttgaccaaactggactcccacttacatacacctatgtacttttctatcagacatttggcttctgttgatcttggtaattctactgtcatttgtcccaaggtgctggcaaattttgttgtggatcgaaatactatttcctattatgcatgtgctgcacagctggcattcttccttatgttcattatcagtgaatttttcatcctgtcagccatggcctatgaccgctatgtggccatttgtaaccctctgctctattatgttattatgtctcagcgactgtgtcatgtactggtgggcattcaatatctctacagcacatttcaggctctgatgttcactattaagatttttacattgaccttctgtggctctaatgtcatcagtcatttttactgtgatgatgttcctttgctacctatgctttgctcaaatgcacaggaaatagaattgttgagcatactattttctgtatttaatttgatctcctcctttctgatagtcttagtgtcctacatgttgattttgttagctatatgtcaaatgcattctgcagagggcaggaaaaaggctttctccacatgtggttcccatttgacagtggtggttgtgttctatgggtctctactcttcatgtacatgcagcccaattccactcacttctttgatactgataaaatggcttctgtgttttacactttagtaatccccatgcttaaccctttgatttacagcttaagaaacgaagaggtgaaaaatgccttctataagctctttgagaattga

SEQ ID NO: 586 - protein, 307 aa, Homo sapiens
MGQHNLTVLTEFILMELTRRPELQIPLFGVFLVIYLITVVGNLTMIILTKLDSHLHTPMYFSIRHLASVDLGNSTVICPKVLANFVVDRNTISYYACAAQLAFFLMFIISEFFILSAMAYDRYVAICNPLLYYVIMSQRLCHVLVGIQYLYSTFQALMFTIKIFTLTFCGSNVISHFYCDDVPLLPMLCSNAQEIELLSILFSVFNLISSFLIVLVSYMLILLAICQMHSAEGRKKAFSTCGSHLTVVVVFYGSLLFMYMQPNSTHFFDTDKMASVFYTLVIPMLNPLIYSLRNEEVKNAFYKLFEN

SEQ ID NO: 587 - DNA, 948 bp, Homo sapiens
  CDS (1)..(948)
atggctcctgaaaatttcaccagggtcactgagtttattctcacaggtgtctctagctgtccagagctccagattcccctcttcctggtcttcctagtgctctatgtgctgaccatggcagggaacctgggcatcatcaccctcaccagtgttgactctcgacttcaaacccccatgtactttttcctgagacatctagctatcatcaatcttggcaactctactgtcattgcccctaaaatgctgatgaactttttagtaaagaagaaaactacctcattctatgaatgtgccacccaactgggagggttcttgttctttattgtatcggaggtaatgatgctggctgtgatggcctatgaccgctatgtggccatttgtaaccctctgctctacatggtggtggtgtctcggcggctctgcctcctgctggtgtccctcacgtacctctatggcttttctacagctattgtggtttcaccttgtatattctctgtgtcttattgctcttctaatataatcaatcatttttactgtgatattgcacctctgttagcattatcttgctctgatacttacataccagaaacaatagtctttatatctgcagcaacaaatttgtttttttccatgattacagttctagtatcttatttcaatattgttttgtccattctaaggatacgttcaccagaaggaaggaaaaaagccttttccacctgcgcttcgcatatgatagcagtcacggttttctatgggacaatgctatttatgtatttgcagccccaaaccaaccactcactggatactgataagatggcttctgtgttttacacattggtgattcctatgctgaatcccttgatctacagcctgaggaataatgatgtaaatgttgccttaaagaaattcatggaaaatccatgttactcctttaaatcaatgtaa

SEQ ID NO: 588 - protein, 315 aa, Homo sapiens [sequence omitted]

SEQ ID NO: 589 - DNA, 861 bp, Homo sapiens
  CDS (1)..(861)
atgggggccatcaagctcagccacaaccttcacactcctatgtactttttcctctgtggcctgtccttttcagaaacttgtaccactgtggtagtaatccctcgcatgttggtggactttctatcagagagcaagaccatttctcttcctgagtgtgccacacagatgtttttctttctgggctttgcatccaacaactgtttcatcatggccgctatgtcctacgaccgctacacggccatccacaacccactgcagtaccacacccttatgacaagaaagatctgcttgcagatgatgatggcttcttggatggttgggttcctgttttctctgtgcatcatcgtcactgtattcaacttgtctctttgcgacttgaacactatccagcactatttctgtgatatctcaccagtggtctcccttgcttgtaattacactttctatcatgaaatggctatttttgtgctctctgcctttgtgttggtgggcagctgtattttaattatgatttcctatgtcttcattgtgttcatagtcataaagatgccctctgcaaaggggaggtctaaggccttctcaacttgctcctcccacctcactgttgtgtccatacactatggatttgcttgctttgtctatttgaggcccaagaacagcaactccttcgatgaagacatgctgacggccatgatatatacaatactgatgcctctgcttaaccccatcgtgtacagtctgagaaacaaagaaatgcagatagccctaagaaaaacactaggcagtgtatttggggttttccctcagaagacaaaaaaagagcctgaacatttaaaaaaattacacagcattgataaataa

SEQ ID NO: 590 - protein, 286 aa, Homo sapiens [sequence omitted]

SEQ ID NO: 591 - DNA, 657 bp, Homo sapiens
  CDS (1)..(657)
atgttcctctcccttgccatgggagccacagagtgtgttctcctgagcatgatggcgtttgatcgctacgtggccatctgcaaccccctttggtaccctgaagtcatgaacaaagctacttatgtgcccatggctgctggctcctgggtagctggaagcctcactgccatggtgcagacaccccttgcattgaggctgcccttctgtggagacaacatcatcaatcacttcacctgtgagattctggctgtcctgaagttggcctgtgctgatatctctgtcaatgtgatcagtatgggagtggccaatgtgatcttcctgggggtccctgttctgttcatctctttctcctatgtcttcatcattgccaccatcctgaggatcccctcagctgaggggaggaaaaaggccttctccacctgctctgcccacctcactgtcgtgatcgtcttctacgggaccatcctcttcatgtacgggaagcccaagtctaaggacccactgggagcagacaaacaggaccttgcagacaaactcatttcccttttctatggggtggtgacccccatgctcaaccccatcatctacagcctgaggaacaaggaagtgaaggctgctgtgaggaacctggtatttcagaaacgcttcctgcagtga

SEQ ID NO: 592 - protein, 218 aa, Homo sapiens [sequence omitted]

SEQ ID NO: 593 - DNA, 627 bp, Homo sapiens
  CDS (1)..(627)
atgggggacaaccaatcacgggtcacagaattcatcctggttggattccagctcagtgtggagatggaagtgctcctcttctggatcttctccctgttatatctcttcagcctgctggggaatggggtcatctttgggctcatctgcctggactctaagcttcacacccccatgtacttcttcctctcacacctggccgtcattgacatgtcctatgcttccaacaatgttcccaagatgctggcaaacctagtgaaccagaaaagaactatctcgttcatctcttgcataatgcagacttttttgtatttggcttttgctgttacagtgtgcctgattttggtggtgatgtcctatgacagatttgtggccatctgccatcccctgcattacactgtcatcatgagctggagagtgtgcactgtcctggctgtggcttcctgggtgttcagcttcctcctggctctggtccatttagttctcattctgaggctgcccttctgtgggccccaggaggtgaaccacttcttcggtgaaatcctgtctgtcctcaagttggcctgtgctgacacctggctcaaccaggtggtcatctttgcagcctgcatgttcatcctggtagggtga

SEQ ID NO: 594 - protein, 208 aa, Homo sapiens
MGDNQSRVTEFILVGFQLSVEMEVLLFWIFSLLYLFSLLGNGVIFGLICLDSKLHTPMYFFLSHLAVIDMSYASNNVPKMLANLVNQKRTISFISCIMQTFLYLAFAVTVCLILVVMSYDRFVAICHPLHYTVIMSWRVCTVLAVASWVFSFLLALVHLVLILRLPFCGPQEVNHFFGEILSVLKLACADTWLNQVVIFAACMFILVG

SEQ ID NO: 595 - DNA, 1134 bp, Homo sapiens
  CDS (1)..(1134)
  modified_base (28)..(127): a, t, c, g, other or unknown
atgaatgatgcaaatccccatttccatnnnnnnnnnnnnnnnnnnnnnnnnnnnnnnnnnnnnnnnnnnnnnnnnnnnnnnnnnnnnnnnnnnnnnnnnnnnnnnnnnnnnnnnnnnnnnnnnnnnngtgctcttcccacaggtggccttttgccccacccccagcatacaatgatggaaatagccaatgtgagttctccagaagtctttgtcctcctgggcttctccacacgaccctcactagaaactgtcctcttcatagttgtcttgagtttttacatggtatcgatcttgggcaatggcatcatcattctggtctcccatacagatgtgcacctccacacacctatgtacttctttcttgccaacctccccttcctggacatgagcttcaccacgagcattgtcccacagctcctggctaacctctggggaccacagaaaaccataagctatggagggtgtgtggtccagttctatatctcccattggctgggggcaaccgagtgtgtcctgctggccaccatgtcctatgaccgctacgctgccatctgcaggccactccattacactgtcattatgcatccacagctttgccttgggctagctttggcctcctggctggggggtctgaccaccagcatggtgggctccacgctcaccatgctcctaccgctgtgtgggaacaattgcatcgaccacttcttttgcgagatgcccctcattatgcaactggcttgtgtggataccagcctcaatgagatggagatgtacctggccagctttgtctttgttgtcctgcctctggggctcatcctggtctcttacggccacattgcccgggccgtgttgaagatcaggtcagcagaagggcggagaaaggcattcaacacctgttcttcccacgtggctgtggtgtctctgttttacgggagcatcatcttcatgtatctccagccagccaagagcacctcccatgagcagggcaagttcatagctctgttctacaccgtagtcactcctgcgctgaacccacttatttacaccctgaggaacacggaggtgaagagcgccctccggcacatggtattagagaactgctgtggctctgcaggcaagctggcgcaaatttag

SEQ ID NO: 596 - protein, 377 aa, Homo sapiens
  MOD_RES (10)..(43): Variable amino acid
MNDANPHFHXXXXXXXXXXXXXXXXXXXXXXXXXXXXXXXXXXALPTGGLLPHPQHTMMEIANVSSPEVFVLLGFSTRPSLETVLFIVVLSFYMVSILGNGIIILVSHTDVHLHTPMYFFLANLPFLDMSFTTSIVPQLLANLWGPQKTISYGGCVVQFYISHWLGATECVLLATMSYDRYAAICRPLHYTVIMHPQLCLGLALASWLGGLTTSMVGSTLTMLLPLCGNNCIDHFFCEMPLIMQLACVDTSLNEMEMYLASFVFVVLPLGLILVSYGHIARAVLKIRSAEGRRKAFNTCSSHVAVVSLFYGSIIFMYLQPAKSTSHEQGKFIALFYTVVTPALNPLIYTLRNTEVKSALRHMVLENCCGSAGKLAQI

SEQ ID NO: 597 - DNA, 861 bp, Homo sapiens
  CDS (1)..(861)
atgggggaaaatcagacaatggtcacagagttcctcctactgggatttctcctgggcccaaggattcagatgctcctctttgggctcttctccctgttctatatcttcaccctgctggggaacggggccatcctggggctcatctcactggactccagactccacacccccatgtacttcttcctctcacacctggctgtcgtcgacatcgcctacacccgcaacacggtgccccagatgctggcgaacctcctgcatccagccaagcccatctcctttgctggctgcatgacgcagacctttctctgtttgagttttggacacagcgaatgtctcctgctggtgctgatgtcctacgatcgttacgtggccatctgccaccctctccgatactccgtcatcatgacctggagagtctgcatcaccctggccgtcacttcctggacgtgtggctccctcctggctctggcccatgtggttctcatcctaagactgcccttctctgggcctcatgaaatcaaccacttcttctgtgaaatcctgtctgtcctcaggctggcctgtgctgacacctggctcaaccaggtggtcatctttgcagcctgcgtgttcttcctggtggggccacccagcctggtgcttgtctcctactcgcacatcctggcggccatcctgaggatccagtctggggagggccgcagaaaggccttctccacctgctcctcccacctctgcgtggtgggactcttctttgcagtgccatcatcatgtacatggcccccaagtcccgccatcctgaggagcagcaaaaggtcttttttctattttacagttttttcaacccaacacttaaccccctga

SEQ ID NO: 598 - protein, 286 aa, Homo sapiens
MGENQTMVTEFLLLGFLLGPRIQMLLFGLFSLFYIFTLLGNGAILGLISLDSRLHTPMYFFLSHLAVVDIAYTRNTVPQMLANLLHPAKPISFAGCMTQTFLCLSFGHSECLLLVLMSYDRYVAICHPLRYSVIMTWRVCITLAVTSWTCGSLLALAHVVLILRLPFSGPHEINHFFCEILSVLRLACADTWLNQVVIFAACVFFLVGPPSLVLVSYSHILAAILRIQSGEGRRKAFSTCSSHLCVVGLFFAVPSSCTWPPSPAILRSSKRSFFYFTVFSTQHLTP

SEQ ID NO: 599 - DNA, 945 bp, Homo sapiens
  CDS (1)..(945)
atgggggatgtgaatcagtcggtggcctcagacttcattctggtgggcctcttcagtcactcaggatcacgccagctcctcttctccctggtggctgtcatgtttgtcataggccttctgggcaacaccgttcttctcttcttgatccgtgtggactcccggctccacacacccatgtacttcctgctcagccagctctccctgtttgacattggctgtcccatggtcaccatccccaagatggcatcagactttctgcggggagaaggtgccacctcctatggaggtggtgcagctcaaatattcttcctcacactgatgggtgtggctgagggcgtcctgttggtcctcatgtcttatgaccgttatgttgctgtgtgccagcccctgcagtatcctgtacttatgagacgccaggtatgtctgctgatgatgggctcctcctgggtggtaggtgtgctcaacgcctccatccagacctccatcaccctgcattttccctactgtgcctcccgtattgtggatcacttcttctgtgaggtgccagccctactgaagctctcctgtgcagatacctgtgcctacgagatggcgctgtccacctcaggggtgctgatcctaatgctccctctttccctcatcgccacctcctacggccacgtgttgcaggctgttctaagcatgcgctcagaggaggccagacacaaggctgtcaccacctgctcctcgcacatcacggtagtggggctcttttatggtgccgccgtgttcatgtacatggtgccttgcgcctaccacagtccacagcaggataacgtggtttccctcttctatagccttgtcacccctacactcaacccccttatctacagtctgaggaatccggaggtgtggatggctttggtcaaagtgcttagcagagctggactcaggcaaatgtgctga

SEQ ID NO: 600 - protein, 314 aa, Homo sapiens
MGDVNQSVASDFILVGLFSHSGSRQLLFSLVAVMFVIGLLGNTVLLFLIRVDSRLHTPMYFLLSQLSLFDIGCPMVTIPKMASDFLRGEGATSYGGGAAQIFFLTLMGVAEGVLLVLMSYDRYVAVCQPLQYPVLMRRQVCLLMMGSSWVVGVLNASIQTSITLHFPYCASRIVDHFFCEVPALLKLSCADTCAYEMALSTSGVLILMLPLSLIATSYGHVLQAVLSMRSEEARHKAVTTCSSHITVVGLFYGAAVFMYMVPCAYHSPQQDNVVSLFYSLVTPTLNPLIYSLRNPEVWMALVKVLSRAGLRQMC

SEQ ID NO: 601 - DNA, 948 bp, Homo sapiens
  CDS (1)..(948)
atgcaggggctaaaccacacctccgtgtctgaattcatcctcgttggcttctctgccttcccccacctccagctgatgctcttcctgctgttcctgctgatgtacctgttcacgctgctgggcaacctgctcatcatggccactgtctggagcgagcgcagcctccacatgcccatgtacctcttcctgtgtgccctctccatcaccgagatcctctacaccgtggccatcatcccgcgcatgctggccgacctgctgtccacccagcgctccatcgccttcctggcctgtgccagtcagatgttcttctccttcagcttcggcttcacccactccttcctgctcactgtcatgggctacgaccgctacgtggccatctgccaccccctgcgttacaacgtgctcatgagcctgcggggctgcacctgccgggtgggctgctcctgggctggtggcttggtcatggggatggtggtgacctcggccattttccacctcgccttctgtggacacaaggagatccaccatttcttctgccacgtgccacctctgttgaagttggcctgtggagatgatgtgctggtggtggccaaaggcgtgggcttggtgtgtatcacggccctgctgggctgttttctcctcatcctcctctcctatgccttcatcgtggccgccatcttgaagatcccttctgctgaaggtcggaacaaggccttctccacctgtgcctctcacctcactgtggtggtcgtgcactatggctttgcctccgtcatttacctgaagcccaaaggtccccagtctccggaaggagacaccttgatgggcatcacctacacggtcctcacacccttcctcagccccatcatcttcagcctcaggaacaaggagctgaaggtcgccatgaagaagacttgcttcaccaaactctttccacagaactgctga

SEQ ID NO: 602 - protein, 315 aa, Homo sapiens
MQGLNHTSVSEFILVGFSAFPHLQLMLFLLFLLMYLFTLLGNLLIMATVWSERSLHMPMYLFLCALSITEILYTVAIIPRMLADLLSTQRSIAFLACASQMFFSFSFGFTHSFLLTVMGYDRYVAICHPLRYNVLMSLRGCTCRVGCSWAGGLVMGMVVTSAIFHLAFCGHKEIHHFFCHVPPLLKLACGDDVLVVAKGVGLVCITALLGCFLLILLSYAFIVAAILKIPSAEGRNKAFSTCASHLTVVVVHYGFASVIYLKPKGPQSPEGDTLMGITYTVLTPFLSPIIFSLRNKELKVAMKKTCFTKLFPQNC

SEQ ID NO: 603 - DNA, 1089 bp, Homo sapiens
  CDS (1)..(1089)
atgacagagtttcatctgcaaagccaaatgccctcaataagactcatcttcagaaggctgtccttaggcagaattaaacccagtcagagccccaggtgttcaacctcatttatggtggtgccttctttctccatcgcagagcactggagaaggatgaaaggggcaaacctgagccaagggatggagtttgagctcttgggcctcaccactgacccccagctccagaggctgctcttcgtggtgttcctgggcatgtacacagccactctgctggggaacctggtcatgttcctcctgatccatgtgagtgccaccctgcacacacccatgtactccctcctgaagagcctctccttcttggatttctgctactcctccacggttgtgccccagaccctggtgaacttcttggccaagaggaaagtgatctcttattttggctgcatgactcagatgttcttctatgcgggttttgccaccagtgagtgctatctcatcgctgccatggcctatgaccgctatgccgctatttgtaaccccctgctctactcaaccatcatgtctcctgaggtctgtgcctcgctgattgtgggctcctacagtgcaggattcctcaattctcttatccacactggctgtatctttagtctgaaattctgcggtgctcatgtcgtcactcacttcttctgtgatgggccacccatcctgtccttgtcttgtgtagacacctcactgtgtgagatcctgctcttcatttttgctggtttcaaccttttgagctgcaccctcaccatcttgatctcctacttcttaattctcaacaccatcctgaaaatgagctcggcccagggcaggtttaaggcattttccacctgtgcatcccacctcactgccatctgcctcttctttggcacaacactttttatgtacctgcgccccaggtccagctactccttgacccaggaccgcacagttgctgtcatctacacagtggtgatcccagtgctgaaccccctcatgtactctttgagaaacaaggatgtgaagaaagctttaataaaggtttggggtaggaaaacaatggaatga

SEQ ID NO: 604 - protein, 362 aa, Homo sapiens
MTEFHLQSQMPSIRLIFRRLSLGRIKPSQSPRCSTSFMVVPSFSIAEHWRRMKGANLSQGMEFELLGLTTDPQLQRLLFVVFLGMYTATLLGNLVMFLLIHVSATLHTPMYSLLKSLSFLDFCYSSTVVPQTLVNFLAKRKVISYFGCMTQMFFYAGFATSECYLIAAMAYDRYAAICNPLLYSTIMSPEVCASLIVGSYSAGFLNSLIHTGCIFSLKFCGAHVVTHFFCDGPPILSLSCVDTSLCEILLFIFAGFNLLSCTLTILISYFLILNTILKMSSAQGRFKAFSTCASHLTAICLFFGTTLFMYLRPRSSYSLTQDRTVAVIYTVVIPVLNPLMYSLRNKDVKKALIKVWGRKTME

SEQ ID NO: 605 - DNA, 993 bp, Homo sapiens
  CDS (1)..(993)
atgttctttattattcattctttggttacttctgtttttctaacagctttgggaccccagaacagaacaatgcattttgtgactgagtttgtcctcctgggtttccatggtcaaagggagatgcagagctgcttcttctcattcatcctggttctctatctcctgacactgctagggaatggagctattgtctgtgcagtgaaattggacaggcggctccacacacccatgtacatccttctgggaaactttgcctttctagagatctggtacatttcctccactgtcccaaacatgctagtcaatatcctctctgagattaaaaccatctccttctctggttgcttcctgcaattctatttctttttttcactgggtacaacagagtgtttctttttatcagttatggcttatgatcggtacctggccatctgtcgtccattacactacccctccatcatgactgggaagttctgtataattctggtctgtgtatgctgggtaggcggatttctctgctatccagtccctattgttcttatctcccaacttcccttctgtgggcccaacatcattgaccacttggtgtgtgacccaggcccattgtttgcactggcctgcatctctgctccttccactgagcttatctgttacaccttcaactcgatgattatctttgggcccttcctctccatcttgggatcttacactctggtcatcagagctgtgctttgtattccctctggtgctggtcgaactaaagctttctccacatgtgggtcccacctaatggtggtgtctctattctatggaacccttatggtgatgtatgtgagcccaacatcagggaacccagcaggaatgcagaagatcatcactctggtatacacagcaatgactccattcttaaatccccttatctatagtcttcgaaacaaagacatgaaagatgctctaaagagagtcctggggttaacagttagccaaaactga

SEQ ID NO: 606 - protein, 330 aa, Homo sapiens
MFFIIHSLVTSVFLTALGPQNRTMHFVTEFVLLGFHGQREMQSCFFSFILVLYLLTLLGNGAIVCAVKLDRRLHTPMYILLGNFAFLEIWYISSTVPNMLVNILSEIKTISFSGCFLQFYFFFSLGTTECFFLSVMAYDRYLAICRPLHYPSIMTGKFCIILVCVCWVGGFLCYPVPIVLISQLPFCGPNIIDHLVCDPGPLFALACISAPSTELICYTFNSMIIFGPFLSILGSYTLVIRAVLCIPSGAGRTKAFSTCGSHLMVVSLFYGTLMVMYVSPTSGNPAGMQKIITLVYTAMTPFLNPLIYSLRNKDMKDALKRVLGLTVSQN

SEQ ID NO: 607 - DNA, 975 bp, Homo sapiens
  CDS (1)..(975)
atgtctttcttctttgtagacttaagacccatgaacaggtcagcaacacacatcgtgacagagtttattctcctgggattccctggttgctggaagattcagattttcctcttctcattgtttttggtgatttatgtcttgaccttgctgggaaatggagccatcatctatgcagtgagatgcaacccactactacacacccccatgtactttctgctgggaaattttgccttccttgagatctggtatgtgtcctccactattcctaacatgctagtcaacattctctccaagaccaaggccatctcattttctgggtgcttcctccagttctatttcttcttttcactgggaacaactgaatgtctctttctggcagtaatggcttatgatcgatacctggccatctgccacccactgcagtaccctgccatcatgactgtaaggttctgtggtaagctggtgtctttctgttggcttattggattccttggatacccaattcccattttctacatctcccaactccccttctgtggtcctaatatcattgatcacttcctgtgtgacatggacccattgatggctctatcctgtgccccagctcccataactgaatgtattttctatactcagagctcccttgtcctctttttcactagtatgtacattcttcgatcctatatcctgttactaacagctgtttttcaggtcccttctgcagctggtcggagaaaagccttctctacctgtggttctcatttggttgtggtatctcttttctatgggacagtcatggtaatgtatgtaagtcctacatatgggatcccaactttattgcagaagatcctcacactggtatattcagtaacgactcctctttttaatcctctgatctatactcttcgtaataaggacatgaaactcgctctgagaaatgtcctgtttggaatgagaattcgtcaaaattcgtga

SEQ ID NO: 608 - protein, 324 aa, Homo sapiens
MSFFFVDLRPMNRSATHIVTEFILLGFPGCWKIQIFLFSLFLVIYVLTLLGNGAIIYAVRCNPLLHTPMYFLLGNFAFLEIWYVSSTIPNMLVNILSKTKAISFSGCFLQFYFFFSLGTTECLFLAVMAYDRYLAICHPLQYPAIMTVRFCGKLVSFCWLIGFLGYPIPIFYISQLPFCGPNIIDHFLCDMDPLMALSCAPAPITECIFYTQSSLVLFFTSMYILRSYILLLTAVFQVPSAAGRRKAFSTCGSHLVVVSLFYGTVMVMYVSPTYGIPTLLQKILTLVYSVTTPLFNPLIYTLRNKDMKLALRNVLFGMRIRQNS

SEQ ID NO: 609 - DNA, 927 bp, Homo sapiens
  CDS (1)..(927)
atggaaacacagaacctcacagtggtgacagaattcattcttcttggtctgacccagtctcaagatgctcaacttctggtctttgtgctagtcttaattttctaccttatcatcctccctggaaatttcctcatcattttcaccataaagtcagaccctgggctcacagcccccctctatttctttctgggcaacttggccttactggatgcatcctactccttcattgtggttcccaggatgttggtggacttcctctctgagaagaaggtaatctcctatagaagctgcatcactcagctctttttcttgcattttcttggagcgggagagatgttcctcctcgttgtgatggcctttgaccgctacatcgccatctgccggcctttacactattcaaccatcatgaaccctagagcctgctatgcattatcgttggttctgtggcttgggggctttatccattccattgtacaagtagcccttatcctgcacttgcctttctgtggcccaaaccagctcgataacttcttctgtgatgttccacaggtcatcaagctggcctgcaccaatacctttgtggtggagcttctgatggtctccaacagtggcctgctcagcctcctgtgcttcctgggccttctggcctcctatgcagtcatcctctgtcgtataagggagcactcctctgaaggaaagagcaaggctatttccacatgcaccacccatattatcattatatttctcatgtttggacctgctattttcatctacacttgccccttccaggctttcccagctgacaaggtagtttctcttttccatactgtcatctttcctttgatgaaccctgttatttatacgcttcgcaaccaggaggtgaaagcttccatgaggaagttgttaagtcaacatatgttttgctga

SEQ ID NO: 610 - protein, 308 aa, Homo sapiens
METQNLTVVTEFILLGLTQSQDAQLLVFVLVLIFYLIILPGNFLIIFTIKSDPGLTAPLYFFLGNLALLDASYSFIVVPRMLVDFLSEKKVISYRSCITQLFFLHFLGAGEMFLLVVMAFDRYIAICRPLHYSTIMNPRACYALSLVLWLGGFIHSIVQVALILHLPFCGPNQLDNFFCDVPQVIKLACTNTFVVELLMVSNSGLLSLLCFLGLLASYAVILCRIREHSSEGKSKAISTCTTHIIIIFLMFGPAIFIYTCPFQAFPADKVVSLFHTVIFPLMNPVIYTLRNQEVKASMRKLLSQHMFC

SEQ ID NO: 611 - DNA, 1038 bp, Homo sapiens
  CDS (1)..(1038)
atgcattttctttcccaaaatgatttaaatataaatctgattccccatctatgtttgcaccgtcattcagtaattgctggtgcttttacaattcacaggcacatgaaaatcttcaacagccccagcaactccagcaccttcactggcttcatcctcctgggcttcccttgccccagggaggggcagatcctcctctttgtgctcttcactgttgtttacctcctgaccctcatgggcaatggttccatcatctgtgctgtgcactgggatcagagactccacgcccccatgtacatcctgctcgccaacttctccttcttggagatatgttatgtcacctccacagtccccagcatgctggccaacttcctctctgacaccaagatcatctcgttctctggctgcttcctccagttctactttttcttctccttgggctctacagaatgctttttcctggcagttatggcatttgatcgataccttgccatctgtcggcctctacgctatccaaccattatgaccagacgtctctgtaccaatcttgtggtcaattgctgggtacttggtttcatctggttcttgattcctatcgtcaacatctcccaaatgtccttctgtggatctaggattattgaccacttcctatgtgacccagctcctcttctaactctcacttgcaaaaaaggccctgtgatagagcttgtcttttctgtcttaagtcctctgcctgtctttatgctctttctcttcattgtggggtcctatgctctggtcgtgagagctgtgttgagggtcccttcagcagctgggagaagaaaggctttctccacctgtgggtctcacctggctgtggtttcactgttctacggctcagtactggtcatgtatgggagcccaccatctaagaatgaagctggaaagcagaagactgtgactctgttttattctgttgttaccccactgcttaaccctgtgatatatagtcttaggaacaaagatatgagaaaagctctgaagaaattttggggaacataa

SEQ ID NO: 612 - protein, 345 aa, Homo sapiens
MHFLSQNDLNINLIPHLCLHRHSVIAGAFTIHRHMKIFNSPSNSSTFTGFILLGFPCPREGQILLFVLFTVVYLLTLMGNGSIICAVHWDQRLHAPMYILLANFSFLEICYVTSTVPSMLANFLSDTKIISFSGCFLQFYFFFSLGSTECFFLAVMAFDRYLAICRPLRYPTIMTRRLCTNLVVNCWVLGFIWFLIPIVNISQMSFCGSRIIDHFLCDPAPLLTLTCKKGPVIELVFSVLSPLPVFMLFLFIVGSYALVVRAVLRVPSAAGRRKAFSTCGSHLAVVSLFYGSVLVMYGSPPSKNEAGKQKTVTLFYSVVTPLLNPVIYSLRNKDMRKALKKFWGT

SEQ ID NO: 613 - DNA, 1044 bp, Homo sapiens
  CDS (1)..(1044)
atgggtaactggactgcagcggtgactgagtttgttctgctggggttttccctgagcagggaggtggagctgctgctcctggtgctcctgctgcccacgttcctgctgactcttctggggaacctgctcatcatctccactgtgctgtcctgctcccgcctccacacccccatgtacttcttcttgtgcaacctctctatcctggacatcctcttcacctcagtcatctctccaaaagtgttggccaacttaggatctagggataaaaccatctcctttgccggatgtatcacccagtgctatttctactttttcttgggcacagttgagttcctcctgctgacggtcatgtcctatgaccgttatgccaccatctgctgccccctgcggtacaccaccatcatgagaccttctgtctgcattgggaccgttgtattctcttgggtgggaggcttcctgtctgtgctctttccaaccatcctcatctcccagctgcccttctgtggctccaatatcattaaccacttcttctgtgacagtggacccttgctggccctggcctgtgcagacaccactgccatcgagctgatggattttatgctttcttccatggtcatcctctgctgcatagtcctcgtggcctattcctatacgtacatcatcttgaccatagtgcgcattccttctgcaagtggaaggaagaaggcctttaatacctgtgcttcccacctgaccatagtcatcattcctagtggcatcactgtgtttatctatgtgactccctcccagaaagaatatctggagatcaacaagatccctttggttctgagcagtgtggtgactccattcctcaacccctttatatatactctgaggaatgacacagtgcagggagtcctcagggatgtgtgggtcagggttcgaggagtttttgaaaagaggatgagggcagtgctgagaagcagattatcctccaacaaagaccaccaaggaagggcttgctcttctccaccatgtgtctattctgtaaagctccagtgttag

SEQ ID NO: 614 - protein, 347 aa, Homo sapiens
MGNWTAAVTEFVLLGFSLSREVELLLLVLLLPTFLLTLLGNLLIISTVLSCSRLHTPMYFFLCNLSILDILFTSVISPKVLANLGSRDKTISFAGCITQCYFYFFLGTVEFLLLTVMSYDRYATICCPLRYTTIMRPSVCIGTVVFSWVGGFLSVLFPTILISQLPFCGSNIINHFFCDSGPLLALACADTTAIELMDFMLSSMVILCCIVLVAYSYTYIILTIVRIPSASGRKKAFNTCASHLTIVIIPSGITVFIYVTPSQKEYLEINKIPLVLSSVVTPFLNPFIYTLRNDTVQGVLRDVWVRVRGVFEKRMRAVLRSRLSSNKDHQGRACSSPPCVYSVKLQC

SEQ ID NO: 615 - DNA, 939 bp, Homo sapiens
  CDS (1)..(939)
atggaagcagaaaaccttacagaattatcaaaatttctcctcctgggactctcagatgatcctgaactgcagcccgtcctctttgggctgttcctgtccatgtacctggtcacggtgctggggaacctgctcatcattctggccgtcagctctgactcccacctccacacccccatgtacttcttcctctccaacctgtcctttgttgacatctgtttcatctccaccacagtccccaagatgctagtgagcatccaggcacggagcaaagacatctcctacatggggtgcctcactcaggtgtattttttaatgatgtttgctggaatggatactttcctactggccgtgatggcctatgaccggtttgtggccatctgccacccactgcactacacggtcatcatgaacccctgcctctgtggcctcctggttctggcatcttggttcatcattttctggttctccctggttcatattctactgatgaagaggttgaccttctccacaggcactgagattccgcatttcttctgtgaaccggctcaggtcctcaaggtggcctgctctaacaccctcctcaataacattgtcttgtatgtggccacggcactgctgggtgtgtttcctgtagctgggatcctcttctcctactctcagattgtctcctccttaatgggaatgtcctccaccaagggcaagtacaaagccttttccacctgtggatctcacctctgtgtggtctccttgttctatggaacaggacttggggtctatctgagttctgctgtgacccattcttcccagagcagctccaccgcctcagtgatgtacgccatggtcacccccatgctgaaccccttcatctacagcctgaggaacaaggatgtgaagggggccctggaaagactcctcagcagggccgactcttgtccatga

SEQ ID NO: 616 - protein, 312 aa, Homo sapiens
MEAENLTELSKFLLLGLSDDPELQPVLFGLFLSMYLVTVLGNLLIILAVSSDSHLHTPMYFFLSNLSFVDICFISTTVPKMLVSIQARSKDISYMGCLTQVYFLMMFAGMDTFLLAVMAYDRFVAICHPLHYTVIMNPCLCGLLVLASWFIIFWFSLVHILLMKRLTFSTGTEIPHFFCEPAQVLKVACSNTLLNNIVLYVATALLGVFPVAGILFSYSQIVSSLMGMSSTKGKYKAFSTCGSHLCVVSLFYGTGLGVYLSSAVTHSSQSSSTASVMYAMVTPMLNPFIYSLRNKDVKGALERLLSRADSCP

SEQ ID NO: 617 - DNA, 933 bp, Homo sapiens
  CDS (1)..(933)
atgggaaagaccaaaaacacatcgctggatgccgtggtgacagatttcattcttctgggtttgtctcaccccccaaatctaagaagcctcctcttcctggtcttcttcatcatttacatcctcactcagctggggaacctgctcattctgctcaccatgtgggctgacccgaagctctgtgctcgccccatgtacattcttctgggagtgctctcattcctggacatgtggctctcctcagtcaccgttcctcggcttattttggattttactccttccatcaaggctatcccgtttggtggctgtgtggctcaactgtatttctttcacttcctgggcagcacccagtgcttcctctacaccttgatggcctatgacaggtacctagcaatatgtcagcccctgcactacccagtgctcatgaatgggaggttatgcacagtccttgtggctggagcttgggtcgccggctccatgcatgggtctatccaggccaccttgaccttccgcctgccctactgtgggcccaatcaggtggattactttatctgtgacatccgcgcagtattgagactggcctgtgctgacacaactgtcaatgagcttgtgacctttgtggacgtcagggtagtggccgccagttgcttcatgttaattctgctctcctatgccaacatagtccatgccatcctgaagatacgcaccgctgatgggaggcgccgggccttctccacctgtggctcccacctaatcgtggtcacagtctactatgtcccctgtattttcatctaccttagggctggctccaaagaccccctggatggggcagcggctgtgttttacactgttgtcactccattactgaaccccctcatctatacactgaggaaccaggaagtgaagtctgccctgaagaggataacagcaggttga

SEQ ID NO: 618 - protein, 310 aa, Homo sapiens
MGKTKNTSLDAVVTDFILLGLSHPPNLRSLLFLVFFIIYILTQLGNLLILLTMWADPKLCARPMYILLGVLSFLDMWLSSVTVPRLILDFTPSIKAIPFGGCVAQLYFFHFLGSTQCFLYTLMAYDRYLAICQPLHYPVLMNGRLCTVLVAGAWVAGSMHGSIQATLTFRLPYCGPNQVDYFICDIRAVLRLACADTTVNELVTFVDVRVVAASCFMLILLSYANIVHAILKIRTADGRRRAFSTCGSHLIVVTVYYVPCIFIYLRAGSKDPLDGAAAVFYTVVTPLLNPLIYTLRNQEVKSALKRITAG

SEQ ID NO: 619 - DNA, 759 bp, Homo sapiens
  CDS (1)..(759)
atgtacttttttctcagcaacttgtctttcatggatatctgcttcacaacagtcatagtgcctaagatgctggtgaattttctatcagagacaaaggttatctcctatgtgggctgcctggcccagatgtacttctttatggcatttgggaacactgacagctacctgctggcctctatggccatcgaccggctggtggccatctgcaaccccttacactatgatgtggttatgaaaccacggcattgcctgctcatgctattgggttcttgcagcatctcccacctacattccctgttccgcgtgctacttatgtctcgcttgtctttctgtgcctctcacatcattaagcactttttctgtgacacccagcctgtgctaaagctctcctgctctgacacatcctccagccagatggtggtgatgactgagaccttagctgtcattgtgacccccttcctgtgtatcatcttctcctacctgcgaatcatggtcactgtgctcagaatcccctctgcagccgggaagtggaaggccttctctacctgtggctcccacctcactgcagtagcccttttctatgggagtattatttatgtctattttaggcccctgtccatgtactcagtggttagggaccgggtagccacagttatgtacacagtagtgacacccatgctgaaccctttcatctacagcctgaggaacaaagatatgaagaggggtttgaagaaattacaggacagaatttaccggtaa

SEQ ID NO: 620 - protein, 252 aa, Homo sapiens
MYFFLSNLSFMDICFTTVIVPKMLVNFLSETKVISYVGCLAQMYFFMAFGNTDSYLLASMAIDRLVAICNPLHYDVVMKPRHCLLMLLGSCSISHLHSLFRVLLMSRLSFCASHIIKHFFCDTQPVLKLSCSDTSSSQMVVMTETLAVIVTPFLCIIFSYLRIMVTVLRIPSAAGKWKAFSTCGSHLTAVALFYGSIIYVYFRPLSMYSVVRDRVATVMYTVVTPMLNPFIYSLRNKDMKRGLKKLQDRIYR

SEQ ID NO: 621 - DNA, 759 bp, Homo sapiens
  CDS (1)..(759)
atgtacttttttctcagcaacttgtctttcatggatatctgcttcacaacagtcatagtgcctaagatgctggtgaattttctatcagagacaaagattatctcttatgtgggctgcctgatccagatgtacttcttcatggcatttgggaacactgacagctacctgctggcctctatggccatcgaccggctggtggccatctgcaaccccttacactatgatgtggttatgaaaccatggcattgcctactcatgctattgggttcttgcagcatctcccacctacattccctgttccgcgtgctacttatgtctcgcttgtctttctgtgcctctcacatcattaagcactttttctgtgacacccagcctgtgctaaagctctcctgctctgacacatcctccagccagatggtggtgatgactgagaccttagctgtcattgtgacccccttcctgtgtaccatcttctcctacctgcaaatcatcgtcactgtgctcagaatcccctctgcagccgggaagtggaaggccttctctacctgtggctcccacctcactgtagtggtcctgttctatgggagtgtcatctatgtctattttaggcctctgtccatgtactcagtgatgaagggccgggtagccacagttatgtacacagtagtgacacccatgctgaaccctttcatctacagcctgaggaacaaagatatgaaaaggggtttgaagaaattaagacacagaatttactcatag

SEQ ID NO: 622 - protein, 252 aa, Homo sapiens
MYFFLSNLSFMDICFTTVIVPKMLVNFLSETKIISYVGCLIQMYFFMAFGNTDSYLLASMAIDRLVAICNPLHYDVVMKPWHCLLMLLGSCSISHLHSLFRVLLMSRLSFCASHIIKHFFCDTQPVLKLSCSDTSSSQMVVMTETLAVIVTPFLCTIFSYLQIIVTVLRIPSAAGKWKAFSTCGSHLTVVVLFYGSVIYVYFRPLSMYSVMKGRVATVMYTVVTPMLNPFIYSLRNKDMKRGLKKLRHRIYS

SEQ ID NO: 623 - DNA, 933 bp, Homo sapiens
  CDS (1)..(933)
atgggggaaaatcagacaatggtcacagagttcctcctactgggatttctcctgggcccaaggattcagatgctcctctttgggctcttctccctgttctatatcttcaccctgctggggaacggggccatcctggggctcatctcactggactccagactccacacccccatgtacttcttcctctcacacctggctgtcgtcgacatcgcctacacccgcaacacggtgccccagatgctggcgaacctcctgcatccagccaagcccatctcctttgctggttgcatgacgcagacctttctctgtttgagttttggacacagcgaatgtctcctgctggtgctgatgtcctacgatcgttacgtggccatctgccaccctctccgatactccgtcatcatgacctggagagtctgcatcaccctggccgtcacttcctggacgtgtggctccctcctggctctggcccatgtggttctcatcctaagactgcccttctctgggcctcatgaaatcaaccacttcttctgtgaaatcctgtctgtcctcaggctggcctgtgctgacacctggctcaaccaggtggtcatctttgcagcctgcgtgttcttcctggtggggccacccagcctggtgcttgtctcctactcgcacatcctggcggccatcctgaggatccagtctggggagggccgcagaaaggccttctccacctgctcctcccacctctgcgtggtgggactcttctttggcagtgccatcatcatgtacatggcccccaagtcccgccatcctgaggagcagcaaaaggtcttttttctattttacagttttttcaacccaacacttaaccccctgatttacagcctgaggaacggagaggtcaagggtgccctgaggagagcactgggcaaggaaagtcattcctaa

SEQ ID NO: 624 - protein, 310 aa, Homo sapiens
MGENQTMVTEFLLLGFLLGPRIQMLLFGLFSLFYIFTLLGNGAILGLISLDSRLHTPMYFFLSHLAVVDIAYTRNTVPQMLANLLHPAKPISFAGCMTQTFLCLSFGHSECLLLVLMSYDRYVAICHPLRYSVIMTWRVCITLAVTSWTCGSLLALAHVVLILRLPFSGPHEINHFFCEILSVLRLACADTWLNQVVIFAACVFFLVGPPSLVLVSYSHILAAILRIQSGEGRRKAFSTCSSHLCVVGLFFGSAIIMYMAPKSRHPEEQQKVFFLFYSFFNPTLNPLIYSLRNGEVKGALRRALGKESHS

SEQ ID NO: 625 - DNA, 1008 bp, Homo sapiens
  CDS (1)..(1008)
atgattgaattttcattttttttgtttgtttgtttgtttcaatggtttctctgtaggaacgtgggggaagatcctatggaaccacagaacaccacacaggtatcaatgtttgtcctcttagggttttcacagacccaagagctccagaaattcctgttccttctgttcctgttagtctatgttaccaccattgtgggaaacctccttatcatggtcacagtgacttttgactgccggctccacacacccatgtattttctgctccgaaatctagctctcatagacctctgctattccacagtcacctctccaaagatgctggtggacttcctccatgagaccaagacgatctcctaccagggctgcatggcccagatcttcttcttccaccttttgggaggtgggactgtcttttttctctcagtcatggcctatgaccgctacatagccatctcccagcccctccggtatgtcaccatcatgaacactcaattgtgtgtgggcctggtagtagccgcctgggtggggggctttgtccactccattgtccaactggctctgatacttccactgcccttctgtggccccaatatcctagataacttctactgtgatgttccccaagtactgagacttgcctgcactgatacctccctcctggagttcctcatgatctccaacagtgggctgctagttatcatctggttcctcctccttctgatctcttatactgtcatcctggtgatgctgaggtcccactcgggaaaggcaaggaggaaggcagcttccacctgcaccacccacatcatcgtggtgtccatgatcttcattccctgtatctatatctatacctggcccttcaccccattcctcatggacaaggctgtgtccatcagctacacagtcatgacccccatgctcaaccccatgatctacaccctgagaaaccaggacatgaaagcagccatgaggagattaggcaagtgcctagtaatttgcagggagtaa

SEQ ID NO: 626 - protein, 335 aa, Homo sapiens
MIEFSFFLFVCLFQWFLCRNVGEDPMEPQNTTQVSMFVLLGFSQTQELQKFLFLLFLLVYVTTIVGNLLIMVTVTFDCRLHTPMYFLLRNLALIDLCYSTVTSPKMLVDFLHETKTISYQGCMAQIFFFHLLGGGTVFFLSVMAYDRYIAISQPLRYVTIMNTQLCVGLVVAAWVGGFVHSIVQLALILPLPFCGPNILDNFYCDVPQVLRLACTDTSLLEFLMISNSGLLVIIWFLLLLISYTVILVMLRSHSGKARRKAASTCTTHIIVVSMIFIPCIYIYTWPFTPFLMDKAVSISYTVMTPMLNPMIYTLRNQDMKAAMRRLGKCLVICRE

SEQ ID NO: 627 - DNA, 924 bp, Homo sapiens
  CDS (1)..(924)
atggaaacagggaacctcacgtgggtatcagactttgtcttcctggggctctcgcagactcgggagctccagcgtttcctgtttctaatgttcctgtttgtctacatcaccactgttatgggaaacatccttatcatcatcacagtgacctctgattcccagctccacacacccatgtactttctgctccgaaacctggctgtcctagacctctgtttctcttcagtcactgctcccaaaatgctagtggacctcctctctgagaagaaaaccatctcttaccagggctgcatgggtcagatcttcttcttccactttttgggaggtgccatggtcttcttcctctcagtgatggcctttgaccgcctcattgccatctcccggcccctccgctatgtcaccgtcatgaacactcagctctgggtggggctggtggtagccacctgggtgggaggctttgtccactctattgtccagctggctctgatgctcccactgcccttctgtggccccaacattttggataacttctactgtgatgttccccaagtactgagacttgcctgcactgacacctcactgctggagttcctcaagatctccaacagtgggctgctggatgtcgtctggttcttcctcctcctgatgtcctacttattcatcctggtgatgctgaggtcacatccaggggaggcaagaaggaaggcagcttccacctgcaccacccacatcatcgtggtttccatgatcttcgttccaagcatttacctctatgcccggcccttcactccattccctatggacaagcttgtgtccatcggccacacagtcatgacccccatgctcaaccccatgatctataccctgaggaaccaggacatgcaggcagcagtgagaagattagggagacaccggctggtttga

SEQ ID NO: 628 - protein, 307 aa, Homo sapiens
METGNLTWVSDFVFLGLSQTRELQRFLFLMFLFVYITTVMGNILIIITVTSDSQLHTPMYFLLRNLAVLDLCFSSVTAPKMLVDLLSEKKTISYQGCMGQIFFFHFLGGAMVFFLSVMAFDRLIAISRPLRYVTVMNTQLWVGLVVATWVGGFVHSIVQLALMLPLPFCGPNILDNFYCDVPQVLRLACTDTSLLEFLKISNSGLLDVVWFFLLLMSYLFILVMLRSHPGEARRKAASTCTTHIIVVSMIFVPSIYLYARPFTPFPMDKLVSIGHTVMTPMLNPMIYTLRNQDMQAAVRRLGRHRLV

SEQ ID NO: 629 - DNA, 999 bp, Homo sapiens
  CDS (1)..(999)
atgagtgatcttttctttctctctacaggtcatccaagagcgagctgtaggatggaggccatgaaactattaaatcaatctcaagtgtcagaattcattttgctgggactgaccagctcccaggatgtagagtttcttctctttgccctcttctcggttatctatgtggtcacagttttgggtaaccttcttattatagtcacagtgtttaacacccctaacctgaatactcccatgtattttctccttggtaatctctcttttgtagatatgacccttgcttcttttgccacccctaaggtgattctgaacttgttaaaaaagcagaaggtaatttcttttgctgggtgcttcactcagatatttctccttcacttactgggtggggttgaaatggtactgttggtctccatggcttttgacagatatgtggccatttgtaagcccctacactacatgaccatcatgaacaagaaggtatgtgttttgcttgtagtgacctcatggctcttgggtctccttcactcagggtttcagataccatttgctgtgaacttgcccttttgtggtcccaatgtggtagacagcattttttgtgacctccctttggttactaagcttgcctgtatagacatatattttgtacaggtagtcattgttgccaacagtggcataatctccctgagctgtttcattattttgcttatctcctacagtctgatcctcataaccattaagaaccactctcctactgggcaatctaaagcccgttccactttgactgctcacatcacagtggtgattctcttctttggcccatgcatctttatctacatttggcccttcggcaaccactctgtagataagttccttgctgtgttttataccatcatcactcctatcttgaatccaattatctatactctgagaaacaaagaaatgaagatatccatgaaaaaactctggagagcttttgtgaattctagagaagatacttag

SEQ ID NO: 630 - protein, 332 aa, Homo sapiens
MSDLFFLSTGHPRASCRMEAMKLLNQSQVSEFILLGLTSSQDVEFLLFALFSVIYVVTVLGNLLIIVTVFNTPNLNTPMYFLLGNLSFVDMTLASFATPKVILNLLKKQKVISFAGCFTQIFLLHLLGGVEMVLLVSMAFDRYVAICKPLHYMTIMNKKVCVLLVVTSWLLGLLHSGFQIPFAVNLPFCGPNVVDSIFCDLPLVTKLACIDIYFVQVVIVANSGIISLSCFIILLISYSLILITIKNHSPTGQSKARSTLTAHITVVILFFGPCIFIYIWPFGNHSVDKFLAVFYTIITPILNPIIYTLRNKEMKISMKKLWRAFVNSREDT

SEQ ID NO: 631 - DNA, 915 bp, Homo sapiens
  CDS (1)..(915)
atggaaagagcaaaccattcagtggtatcggaatttattttgttgggactttccaaatctcaaaatcttcagattttattcttcttgggattctctgtggtcttcgtggggattgtgttaggaaacctgctcatcttggtgactgtgacctttgattcgctccttcacacaccaatgtattttctgcttagcaacctctcctgcattgatatgatcctggcttcttttgctacccctaagatgattgtagatttcctccgagaacgtaagaccatctcatggtggggatgttattcccagatgttctttatgcacctcctgggtgggagtgagatgatgttgcttgtagccatggcaatagacaggtatgttgccatatgcaaacccctccattacatgaccatcatgagcccacgggtgctcactgggctactgttatcctcctatgcagttggatttgtgcactcatctagtcaaatggctttcatgttgactttgcccttctgtggtcccaatgttatagacagctttttctgtgaccttccccttgtgattaaacttgcctgcaaggacacctacatcctacagctcctggtcattgctgacagtgggctcctgtcactggtctgcttcctcctcttgcttgtctcctatggagtcataatattctcagttaggtaccgtgctgctagtcgatcctctaaggctttctccactctctcagctcacatcacagttgtgactctgttctttgctccgtgtgtctttatctacgtctggcccttcagcagatactcggtagataaaattctttctgtgttttacacaattttcacacctctcttaaatcctattatttatacattaagaaatcaagaggtaaaagcagccattaaaaaaagactctgcatataa

SEQ ID NO: 632 - protein, 304 aa, Homo sapiens
MERANHSVVSEFILLGLSKSQNLQILFFLGFSVVFVGIVLGNLLILVTVTFDSLLHTPMYFLLSNLSCIDMILASFATPKMIVDFLRERKTISWWGCYSQMFFMHLLGGSEMMLLVAMAIDRYVAICKPLHYMTIMSPRVLTGLLLSSYAVGFVHSSSQMAFMLTLPFCGPNVIDSFFCDLPLVIKLACKDTYILQLLVIADSGLLSLVCFLLLLVSYGVIIFSVRYRAASRSSKAFSTLSAHITVVTLFFAPCVFIYVWPFSRYSVDKILSVFYTIFTPLLNPIIYTLRNQEVKAAIKKRLCI

SEQ ID NO: 633 - DNA, 942 bp, Homo sapiens
  CDS (1)..(942)
atggacagtctaaaccaaacaagagtgactgaatttgtcttcttgggactcactgataaccgggtgctggaaatgctgtttttcatggcattctcagccatttatatgctaacgctttcagggaacattctcatcatcattgccacagtctttactccaagtctccatacccccatgtatttcttcctgagcaatctgtcctttattgacatctgccactcatctgtcactgtgcctaagatgttggagggtttgcttttagaaagaaagaccatttcctttgacaactgcatcacacagctcttcttcctacatctctttgcctgtgccgagatctttctgctgatcattgtggcgtatgatcgttacgtggctatctgcactccactccactaccccaatgtgatgaacatgagagtctgtatacagcttgtctttgctctctggttggggggtactgttcactcactagggcagaccttcttgactattcgtctaccttactgtggccccaacattattgacagctacttctgtgatgtgcctcttgttatcaagctggcctgcacagatacatacctcacaggaatactgattgtgaccaatagtggaaccatctccctctcctgtttcttggccgtggtcacctcctatatggtcatcctggtttctcttcgaaaacactcagctgaagggcgccagaaagccctgtctacctgctcggcccacttcatggtggttgccctcttctttgggccatgtatcttcatctatactcggccagacaccagcttctccattgacaaggtggtgtctgtcttctacacagtggtcacccctttgctgaatcccttcatttacaccttgaggaatgaggaggtaaaaagtgccatgaagcagctcaggcagagacaagtttttttcacgaaatcatatacataa

SEQ ID NO: 634 - protein, 313 aa, Homo sapiens
MDSLNQTRVTEFVFLGLTDNRVLEMLFFMAFSAIYMLTLSGNILIIIATVFTPSLHTPMYFFLSNLSFIDICHSSVTVPKMLEGLLLERKTISFDNCITQLFFLHLFACAEIFLLIIVAYDRYVAICTPLHYPNVMNMRVCIQLVFALWLGGTVHSLGQTFLTIRLPYCGPNIIDSYFCDVPLVIKLACTDTYLTGILIVTNSGTISLSCFLAVVTSYMVILVSLRKHSAEGRQKALSTCSAHFMVVALFFGPCIFIYTRPDTSFSIDKVVSVFYTVVTPLLNPFIYTLRNEEVKSAMKQLRQRQVFFTKSYT

SEQ ID NO: 635 - DNA, 765 bp, Homo sapiens
  CDS (1)..(765)
atgtacatctttcttggtgttctctcagtcattgatatgagcatctcctccatcattgtccctcgcctcatgatgaacttcactttaggtgtcaaacccatcccatttggtggctgtgttgctcaactctatttctatcacttcctgggcagcacccagtgcttcctctacaccctaatggcctatgacaggtacctggcaatatgtcagcccctgcgctaccctgtgctcatgactgctaagctgagcgccttgcttgtggctggagcctggatggcaggatccatccatggggctctccaggccatcctaaccttccgcctgccctactgtgggcccaatcaggtggattacttcttctgtgacatccctgcagtgttgagactggcctgtgctgacacaacagtcaacgagctggtgacgtttgtagacattggggtggtggttgccagttgcttctccctgatcctcctctcctacatacagatcattcaggccatcctgagaatccacacagctgatgggcggcgccgggctttttcaacttgtggagcccatgtaaccgtggtcaccgtgtactatgtgccctgtgccttcatctacctgaggcctgaaaccaacagccccctggatggggcagctgccctagtccccacggccatcactcctttcctcaacccccttatctacactctgcggaaccaagaggtgaagctggccctgaaaagaatgctcagaagcccaagaactccgagtgaggtttga

SEQ ID NO: 636 - protein, 254 aa, Homo sapiens
MYIFLGVLSVIDMSISSIIVPRLMMNFTLGVKPIPFGGCVAQLYFYHFLGSTQCFLYTLMAYDRYLAICQPLRYPVLMTAKLSALLVAGAWMAGSIHGALQAILTFRLPYCGPNQVDYFFCDIPAVLRLACADTTVNELVTFVDIGVVVASCFSLILLSYIQIIQAILRIHTADGRRRAFSTCGAHVTVVTVYYVPCAFIYLRPETNSPLDGAAALVPTAITPFLNPLIYTLRNQEVKLALKRMLRSPRTPSEV

SEQ ID NO: 637 - DNA, 888 bp, Homo sapiens
  CDS (1)..(888)
atgtacctggtcacggtgctgaggaacctgctcatcatcctggctgtcagctctgactcccacctccacacctccatgtacttcgtcctctccaacctgcgctgggttgacatcggtttcacctcggccacggttcccaagatgattgtggacatgcagtcgcatagcagagtcatctcttatgcgggctgcctgacacagatgtctttcttggtcttttttgcatgtatagaagacatgctcctgactgtgatgtcctatgaccaatttttggccatctgtcaccccctgcactacccagtcatcgtgaatcctcacttctgtgtcttcttagttttggtgtcctttttccttagcctgttggattcccagctgcatagatggattgtgttacaattcaccttcttcaagaatgtggaaatctctaattttgtctgtgagccatctcaacttctcaaccttgcctgttctgacagcgtcatcaatatcatattcatatatttagatagtactatgtttggttttcttcccatttcagggatccttttgtcttactataaaattgtcccctccattctaaggatgtcattgtcagatgtgaagtataaagccttctccacctgtggctctcacctggcagttttttgcttattttacggagcaggcattggcgtgtacctgacttcagctgtgtcaccaccttccggcaatggtgtggtggcttcagtgatgtacactgtggtcacccccatgctgaaccctttcatctacagcctgagaaacagggacattcaaagtgccccgtggaggctgcgcagcacaacagttgaatctcatgatctcttccatcctttttcttgtgtctgtaagaaagggcaaccacattaa

SEQ ID NO: 638 - protein, 295 aa, Homo sapiens [sequence omitted]

SEQ ID NO: 639 - DNA, 981 bp, Homo sapiens
  CDS (1)..(981)
atgtgtcccttgaccttgcaggtcactggcctaatgaatgtctctgagccaaattccagctttgcttttgtaaatgaatttatactccaaggtttctcttgtgagtggacaattcagatcttcctcttctcactctttactacaacatatgcactgactataacagggaatggagccattgcttttgtcctgtggtgtgaccggcgacttcacactcccatgtacatgttcctgggaaatttctcctttttagagatatggtatgtctcttctacagttcccaagatgttggtcaacttcctttcagagaaaaaaaacatctcctttgctggatgttttctccagttttatttcttcttctctttgggtacatcagaatgcttgcttttgactgtgatggcctttgatcagtaccttgctatctgccgtcccttgctctatcctaatatcatgactgggcatctctatgccaaactggtcatactgtgctgggtttgtggatttctgtggttcctgatccccattgttctcatctctcagatgcccttctgtggcccaaacattattgaccatgttgtgtgtgacccagggccacgatttgcattggattgtgtttctgccccaagaatccaactgttttgctacactctaagctcattagttatttttggtaacttcctctttattattggatcctatactcttgtcctgaaagctatgttgggtatgccttcaagcactgggagacataaggccttctctacctgtgggtctcatttggctgtggtatcactgtgctatagctctcttatggtcatgtatgtgagcccaggactcggacattctacagggatgcagaaaattgaaactttgttctatgctatggtgaccccactcttcaatccccttatctatagcctccagaataaggagataaaggcagccctgaggaaagttctggggagttccaacataatctaa

SEQ ID NO: 640 - protein, 326 aa, Homo sapiens
MCPLTLQVTGLMNVSEPNSSFAFVNEFILQGFSCEWTIQIFLFSLFTTTYALTITGNGAIAFVLWCDRRLHTPMYMFLGNFSFLEIWYVSSTVPKMLVNFLSEKKNISFAGCFLQFYFFFSLGTSECLLLTVMAFDQYLAICRPLLYPNIMTGHLYAKLVILCWVCGFLWFLIPIVLISQMPFCGPNIIDHVVCDPGPRFALDCVSAPRIQLFCYTLSSLVIFGNFLFIIGSYTLVLKAMLGMPSSTGRHKAFSTCGSHLAVVSLCYSSLMVMYVSPGLGHSTGMQKIETLFYAMVTPLFNPLIYSLQNKEIKAALRKVLGSSNII

SEQ ID NO: 641 - DNA, 1038 bp, Homo sapiens
  CDS (1)..(1038)
atgccgatgcagctgctgcttacagattttattatcttttccatcagattcatcatcaacagcatggaagcgagaaaccaaacagctatttcaaaattccttctcctgggactgatagaggatccggaactgcagcccgtccttttcagcctgttcctgtccatgtacttggtcaccatcctggggaacctgctcatcctcttggctgtcatctctgactctcacctccacacccccatgtacttcttcctctccaatctctcctttttggacatttgtttaagcacaaccacgatcccaaagatgctggtgaacatccaagctcagaatcggagcatcacgtactcaggctgcctcacccagatctgctttgtcttgttttttgctggcttggaaaattgtctccttgcagcaatggcctatgaccgctatgtggccatttgtcacccccttagatacacagtcatcatgaacccccgcctctgtggcctgctgattcttctctctctgttgactagtgttgtgaatgcccttcttctcagcctgatggtgttgaggctgtccttctgcacagacctggaaatcccgctcttcttctgtgaactggctcaggtcatccaactcacctgttcagacaccctcatcaataacatcctgatatattttgcagcttgcatatttggtggtgttcctctgtctggaatcattttgtcttacactcagatcacctcctgtgttttgagaatgccatcagcaagtggaaagcacaaagcagtttccacctgtgggtctcacctctccattgttctcttgttctatggggcaggtttgggggtgtacattagttctgtggttactgactcacctaggaagactgcagtggcttcagtgatgtattctgtgttccctcaaatggtgaacccctttatctatagtctgaggaataaggacatgaaaggaaccttgaggaagttcatagggaggataccttctcttctgtggtgtgccatttgctttggattcaggtttctagagtaa

SEQ ID NO: 642 - protein, 345 aa, Homo sapiens
MPMQLLLTDFIIFSIRFIINSMEARNQTAISKFLLLGLIEDPELQPVLFSLFLSMYLVTILGNLLILLAVISDSHLHTPMYFFLSNLSFLDICLSTTTIPKMLVNIQAQNRSITYSGCLTQICFVLFFAGLENCLLAAMAYDRYVAICHPLRYTVIMNPRLCGLLILLSLLTSVVNALLLSLMVLRLSFCTDLEIPLFFCELAQVIQLTCSDTLINNILIYFAACIFGGVPLSGIILSYTQITSCVLRMPSASGKHKAVSTCGSHLSIVLLFYGAGLGVYISSVVTDSPRKTAVASVMYSVFPQMVNPFIYSLRNKDMKGTLRKFIGRIPSLLWCAICFGFRFLE

SEQ ID NO: 643 - DNA, 939 bp, Homo sapiens
  CDS (1)..(939)
atgaaagcaggaaacttctcagacactccagaattctttctcttgggattgtcaggggatccggagctgcagcccatcctcttcatgctgttcctgtccatgtacctggccacaatgctggggaacctgctcatcatcctggccgtcaactctgactcccacctccacacccccatgtacttcctcctctctatcctgtccttggtcgacatctgtttcacctccaccacgatgcccaagatgctggtgaacatccaggcacaggctcaatccatcaattacacaggctgcctcacccaaatctgctttgtcctggtttttgttggattggaaaatggaattctggtcatgatggcctatgatcgatttgtggccatctgtcacccactgaggtacaatgtcatcatgaaccccaaactctgtgggctgctgcttctgctgtccttcatcgttagtgtcctggatgctctgctgcacacgttgatggtgctacagctgaccttctgcatagacctggaaattccccactttttctgtgaactagctcatattctcaagctcgcctgttctgatgtcctcatcaataacatcctggtgtatttggtgaccagcctgttaggtgttgttcctctctctgggatcattttctcttacacacgaattgtctcctctgtcatgaaaattccatcagctggtggaaagtataaagctttttccatctgcgggtcacatttaatcgttgtttccttgttttatggaacagggtttggggtgtaccttagttctggggctacccactcctccaggaagggtgcaatagcatcagtgatgtataccgtggtcacccccatgctgaacccactcatttacagcctgagaaacaaggacatgttgaaggctttgaggaaactaatatctaggataccatctttccattga

SEQ ID NO: 644 - protein, 312 aa, Homo sapiens
MKAGNFSDTPEFFLLGLSGDPELQPILFMLFLSMYLATMLGNLLIILAVNSDSHLHTPMYFLLSILSLVDICFTSTTMPKMLVNIQAQAQSINYTGCLTQICFVLVFVGLENGILVMMAYDRFVAICHPLRYNVIMNPKLCGLLLLLSFIVSVLDALLHTLMVLQLTFCIDLEIPHFFCELAHILKLACSDVLINNILVYLVTSLLGVVPLSGIIFSYTRIVSSVMKIPSAGGKYKAFSICGSHLIVVSLFYGTGFGVYLSSGATHSSRKGAIASVMYTVVTPMLNPLIYSLRNKDMLKALRKLISRIPSFH

SEQ ID NO: 645 - DNA, 936 bp, Homo sapiens
  CDS (1)..(936)
atgggacccagaaaccaaacagctgtttcagaatttcttctcatgaaagtgacagaggacccagaactgaagttaatccctttcagcctgttcctgtccatgtacctggtcaccatcctggggaacctgctcattctcctggctgtcatctctgactcccacctccacacccccatgtacttccttctctttaatctctcctttactgacatctgtttaaccacaaccacagtcccaaagatcctagtgaacatccaagctcagaatcagagtatcacttacacaggctgcctcacccagatctgtcttgtcttggtttttgctggcttggaaagttgctttcttgcagtcatggcctacgaccgctatgtggccatttgccacccactgaggtacacagtcctcatgaatgtccatttctggggcttgctgattcttctctccatgttcatgagcactatggatgccctggttcagagtctgatggtattgcagctgtccttctgcaaaaacgttgaaatccctttgttcttctgtgaagtcgttcaggtcatcaagctcgcctgttctgacaccctcatcaacaacatcctcatatattttgcaagtagtgtatttggtgcaattcctctctctggaataattttctcttattctcaaatagtcacctctgttctgagaatgccatcagcaagaggaaagtataaagcgttttccacctgtggctgtcacctctctgttttttccttgttctatgggacagcttttggggtgtacattagttctgctgttgctgagtcttcccgaattactgctgtggcttcagtgatgtacactgtggtccctcaaatgatgaaccccttcatctacagcctgagaaataaggagatgaagaaagctttgaggaaacttattggtaggctgtttcctttttag

SEQ ID NO: 646 - protein, 311 aa, Homo sapiens
MGPRNQTAVSEFLLMKVTEDPELKLIPFSLFLSMYLVTILGNLLILLAVISDSHLHTPMYFLLFNLSFTDICLTTTTVPKILVNIQAQNQSITYTGCLTQICLVLVFAGLESCFLAVMAYDRYVAICHPLRYTVLMNVHFWGLLILLSMFMSTMDALVQSLMVLQLSFCKNVEIPLFFCEVVQVIKLACSDTLINNILIYFASSVFGAIPLSGIIFSYSQIVTSVLRMPSARGKYKAFSTCGCHLSVFSLFYGTAFGVYISSAVAESSRITAVASVMYTVVPQMMNPFIYSLRNKEMKKALRKLIGRLFPF

SEQ ID NO: 647 - DNA, 942 bp, Homo sapiens
  CDS (1)..(942)
atggaaccaagaaaccaaaccagtgcatctcaattcatcctcctgggactctcagaaaagccagagcaggagacgcttctcttttccctgttcttctgcatgtacctggtcatggtcgtggggaacctgctcatcatcctggccatcagcatagactcccacctccacacccccatgtacttcttcctggccaacctgtccctggttgatttctgtctggccaccaacaccatccctaagatgctggtgagccttcaaaccgggagcaaggccatctcttatccctgctgcctgatccagatgtacttcttccatttctttggcatcgtggacagcgtcataatcgccatgatggcttatgaccggttcgtggccatctgccacccattgcactacgccaagatcatgagcctacgcctctgtcgcctgctggtcggcgccctctgggcgttttcctgcttcatctcactcactcacatcctcctgatggcccgtctcgttttctgcggcagccatgaggtgcctcactacttctgcgacctcactcccatcctccgactttcgtgcacggacacctctgtgaataggatcttcatcctcattgtggcagggatggtgatagccacgccctttgtctgcatcctggcctcctatgctcgcatccttgtggccatcatgaaggtcccctctgcaggcggcaggaagaaagccttctccacctgcagctcccacctgtctgtggttgctctcttctatgggaccaccattggcgtctatctgtgtccctcctcggtcctcaccactgtgaaggagaaagcttctgcggtgatgtacacagcagtcacccccatgctgaatcccttcatctacagcttgaggaacagagacctgaaaggggctctcaggaagctggtcaacagaaagatcacctcatcttcctga

SEQ ID NO: 648 - protein, 313 aa, Homo sapiens
MEPRNQTSASQFILLGLSEKPEQETLLFSLFFCMYLVMVVGNLLIILAISIDSHLHTPMYFFLANLSLVDFCLATNTIPKMLVSLQTGSKAISYPCCLIQMYFFHFFGIVDSVIIAMMAYDRFVAICHPLHYAKIMSLRLCRLLVGALWAFSCFISLTHILLMARLVFCGSHEVPHYFCDLTPILRLSCTDTSVNRIFILIVAGMVIATPFVCILASYARILVAIMKVPSAGGRKKAFSTCSSHLSVVALFYGTTIGVYLCPSSVLTTVKEKASAVMYTAVTPMLNPFIYSLRNRDLKGALRKLVNRKITSSS

SEQ ID NO: 649 - DNA, 954 bp, Homo sapiens
  CDS (1)..(954)
atgagaaatttgagtggaggccatgtcgaggagtttgtcttggtgggtttccctaccacgcctcccctccagctgctcctctttgtccttttttttgcaatttaccttctgacattgttggagaatgcacttattgtcttcacaatatggcttgctccaagccttcatcgtcccatgtactttttccttggccatctctctttcctggagctatggtacatcaatgtcaccattcctcggctcttggcagcctttcttacccaggatggtagagtctcctacgtaggttgcatgacccaactgtacttctttattgccttagcctgtactgaatgtgtgctgttggcagttatggcctatgatcgctacctggccatctgtggacccctcctttaccctagtctcatgccttccagtctggccactcgccttgctgctgcctcttggggcagtggcttcttcagctccatgatgaagcttctttttatttcccaattgtcctactgtggacccaacattatcaaccactttttctgtgatatttccccactactcaacctcacctgctctgacaaggagcaagcagagctagtagacttccttctggccctggtgatgattctactccctctattggctgtggtttcatcatacactgccatcattgcagccatcctgaggatccctacgtccaggggacgccacaaagccttttccacttgtgccgctcatctggcagtggttgttatctactactcctccactctcttcacctatgcacggccccgggccatgtacaccttcaaccacaacaagattatctctgtgctctacactatcattgtaccattcttcaacccagccatctactgcctgaggaacaaggaggtgaaggaggccttcaggaagacagtgatgggcagatgtcactatcctagggatgttcaggactga

SEQ ID NO: 650 - protein, 317 aa, Homo sapiens
MRNLSGGHVEEFVLVGFPTTPPLQLLLFVLFFAIYLLTLLENALIVFTIWLAPSLHRPMYFFLGHLSFLELWYINVTIPRLLAAFLTQDGRVSYVGCMTQLYFFIALACTECVLLAVMAYDRYLAICGPLLYPSLMPSSLATRLAAASWGSGFFSSMMKLLFISQLSYCGPNIINHFFCDISPLLNLTCSDKEQAELVDFLLALVMILLPLLAVVSSYTAIIAAILRIPTSRGRHKAFSTCAAHLAVVVIYYSSTLFTYARPRAMYTFNHNKIISVLYTIIVPFFNPAIYCLRNKEVKEAFRKTVMGRCHYPRDVQD

SEQ ID NO: 651 - DNA, 759 bp, Homo sapiens
  CDS (1)..(759)
atgtatctcttccttagtgcactctccttctctgagacctgctatacactgaccatcgtccccaagatgctggaagatctactggccaaggacagaagcatttcagtcacaggttgtagcttacagatgtgcttcttcttgggacttggtggcacaaactgtatcattctcactttgatgggatatgaccgcttcctggccatttgtaaccctctaagatatccactgcttatgaccaacattgtatgtggacaacttgtggcctctgcttgcactgcaggcttctttatctctcttacagagactgcactgatattcagggactctttctgcagacccaaccttgtcaaacacttcttctgccatatgctggcagttattaggctgtcttgtatagacagtaaccacacagaattcattataacactgatctcagtgtctggtttgctgggtacccttctgctcatcatcctgactgatgtcttcattatttctactgtcctcaggatcccttcagctgagggcaagcagaaggccttcaccacctgtgcctcccacctcaccgtggttataatccactttggttttgcatctattgtttatttgaagccagaagcctcaggagatgacacactcatagcagtcccttatactgtcattacccccttcctcagccccatcatattcagcctgaggaataaggacatgaaaaatgcttttagaagaatgatgggaaacacagttgccttgaaaaaataa

SEQ ID NO: 652 - protein, 252 aa, Homo sapiens [sequence omitted]

SEQ ID NO: 653 - DNA, 942 bp, Homo sapiens
  CDS (1)..(942)
atggggcagaccaacgtaacctcctggagggattttgtcttcctgggcttctccagttctggggagttgcagctccttctctttgccttgttcctctctctgtatctagtcactctgaccagcaatgtcttcattatcatagccatcaggctggatagccatctgcacacccccatgtacctcttcctttccttcctatccttctctgagacctgctacactttgggcatcatccctagaatgctctctggcctggctgggggggaccaggctatctcctatgtgggctgtgctgcccagatgttcttttctgcctcatgggcctgtactaactgcttccttctggctgccatgggctttgacagatatgtggccatctgtgctccactccactatgccagccacatgaatcctaccctctgtgcccagctggtcattacttccttcctgactggatacctctttggactgggaatgacactagttattttccacctctcattctgcagctcccatgaaatccagcactttttttgtgacacgccacctgtgctgagcctagcctgtggagatacaggcccgagtgagctgaggatctttatcctcagtcttttggtcctcttggtctccttcttcttcatcaccatctcctacgcctacatcttggcagcaatactgaggatcccctctgctgaggggcagaagaaggccttctccacttgtgcctcgcaccttacagtggtcattattcattatggctgtgcttccttcgtgtacctgaggcccaaagccagctactctcttgagagagatcagcttattgccatgacctatactgtagtgacccccctccttaatcccattgtttatagtctaaggactagggctatacagacagctctgaggaatgctttcagagggagattgctgggtaaaggatga

SEQ ID NO: 654 - protein, 313 aa, Homo sapiens [sequence omitted]

SEQ ID NO: 655 - DNA, 939 bp, Homo sapiens
  CDS (1)..(939)
atggacacagggaactggagccaggtagcagaattcatcatcttgggcttcccccatctccagggtgtccagatttatctcttcctcttgttgcttctcatttacctcatgactgtgttgggaaacctgctgatattcctggtggtctgcctggactcccggcttcacacacccatgtaccactttgtcagcattctctccttctcagagcttggctatacagctgccaccatccctaagatgctggcaaacttgttcagtgagaaaaagaccatttcattctctgggtgtctcctgcagatctatttctttcactcccttggagcgactgagtgctatctcctgacagctatggcctacgataggtatttagccatctgccggcccctccactacccaaccctcatgaccccaacactttgtgcagagattgccattggctgttggttgggaggcttggctgggccagtagttgaaatttccttgatttcacgcctcccattctgtggccccaatcgcattcagcacgtcttttgtgacttccctcctgtgctgagtttggcttgcactgatacgtctacaaatgtcctagtagattttgttataaattcctgcaagatcctagccaccttcctgctgatcctctgctcctatgtgcagatcatctgcacagtgctcagaattccctcagctgccggcaagaggaaggccatctccacgtgtgcctcccacctcactgtggttctcatcttctatgggagcatcctttccatgtatgtgcggctgaagaagagctactcactggactatgaccaggccctggcagtggtctactcagtgctcacacccttcctcaaccccttcatctacagcttgcacaacaaggagatcaaggaggctgtgaggaggcagctaaagagaattgggatattggcatga

SEQ ID NO: 656 - protein, 312 aa, Homo sapiens [sequence omitted]

SEQ ID NO: 657 - DNA, 1047 bp, Homo sapiens
  CDS (1)..(1047)
atgctcacttcattaactgatctctgtttctctcctattcaggtagctgaaattaagtcccttccaaaatcgatgaatgagacaaatcattctcgggtgacagaatttgtgttgctgggactgtctagttcaagggagctccaacctttcttgtttcttacattttcactactttatctagcaattctgttgggcaactttctcatcatcctcactgtgacctcagattcccgccttcacacccccatgtactttctgcttgcaaacctgtcatttatagacgtatgtgttgcctcttttgctacccctaaaatgattgcagactttctggttgagcgcaagactatttcttttgatgcctgcctggcccagattttctttgttcatctcttcactggcagtgaaatggtgctcctagtttccatggcctatgaccgttatgttgctatatgcaaacctctccactacatgacagtcatgagccgtcgtgtatgtgttgtgctcgtcctcatttcatggtttgtgggcttcatccatactaccagccagttggcattcactgttaatctgccattttgtggtcctaataaggtagacagttttttctgtgaccttcctctagtgaccaagttagcctgcatagacacttatgttgtcagcttactaatagttgcagatagtggctttctttctctgagttcctttctcctcttggttgtctcctacactgtaatacttgttacagttaggaatcgctcctctgcaagcatggcgaaggcccgctccacattgactgctcacatcactgtggtcactttattctttggaccatgcattttcatctatgtgtggcccttcagcagttactcagttgacaaagtccttgctgtattctacaccatcttcacgcttattttaaaccctgtaatctacacgctaagaaacaaagaagtgaaggcagctatgtcaaaactgaagagtcggtatctgaagcctagtcaggtttctgtagtcataagaaatgttcttttcctagaaacaaagtaa

SEQ ID NO: 658 - protein, 348 aa, Homo sapiens
MLTSLTDLCFSPIQVAEIKSLPKSMNETNHSRVTEFVLLGLSSSRELQPFLFLTFSLLYLAILLGNFLIILTVTSDSRLHTPMYFLLANLSFIDVCVASFATPKMIADFLVERKTISFDACLAQIFFVHLFTGSEMVLLVSMAYDRYVAICKPLHYMTVMSRRVCVVLVLISWFVGFIHTTSQLAFTVNLPFCGPNKVDSFFCDLPLVTKLACIDTYVVSLLIVADSGFLSLSSFLLLVVSYTVILVTVRNRSSASMAKARSTLTAHITVVTLFFGPCIFIYVWPFSSYSVDKVLAVFYTIFTLILNPVIYTLRNKEVKAAMSKLKSRYLKPSQVSVVIRNVLFLETK

SEQ ID NO: 659 - DNA, 1032 bp, Homo sapiens
  CDS (1)..(1032)
atgcattttcttcctactgtctttggcttcctaaacagagtcacacttggtatcttcagagagactatggtcaatttgacttcaatgagtggattccttcttatggggttttctgatgagcgtaagcttcagattttacatgcattggtatttctggtgacatacctgctggccttgacaggcaacctcctcattatcaccatcattaccgtggaccgtcgtctccattcccccatgtattactttttaaagcacctctctcttctggacctctgcttcatctctgtcacagtcccccagtccattgcaaattcacttatgggcaacggttacatttctcttgttcagtgcattcttcaggttttcttcttcatagctctggcctcatcagaagtggccattctcacagtgatgtcttatgacaggtacgcagcaatctgtcaaccacttcattatgagactattatggatccccgtgcctgtaggcatgcagtgatagctgtgtggattgctgggggcctctctgggctcatgcatgctgccattaacttctccatacctctctgtgggaagagagtcattcaccaattcttctgtgatgttcctcagatgctgaaactagcctgttcttatgaattcattaatgagattgcactggctgcattcacaacgtctgcagcatttatctgtttgatctccattgtgctctcctacattcgcatcttctctacagtgctgagaatcccatcagctgagggccggaccaaggtcttctccacctgcctaccacacctatttgtagccaccttctttctttcagctgcaggctttgagtttctcagactgccttctgattcctcatcgactgtggaccttgtattctccgtattctatactgtgatacctccaacactcaatccagtcatttatagcttacggaatgattccatgaaggcagcactgaggaagatgctgtcaaaggaagagcttcctcagagaaaaatgtgcttaaaagccatgtttaaactctga

SEQ ID NO: 660 - protein, 343 aa, Homo sapiens
MHFLPTVFGFLNRVTLGIFRETMVNLTSMSGFLLMGFSDERKLQILHALVFLVTYLLALTGNLLIITIITVDRRLHSPMYYFLKHLSLLDLCFISVTVPQSIANSLMGNGYISLVQCILQVFFFIALASSEVAILTVMSYDRYAAICQPLHYETIMDPRACRHAVIAVWIAGGLSGLMHAAINFSIPLCGKRVIHQFFCDVPQMLKLACSYEFINEIALAAFTTSAAFICLISIVLSYIRIFSTVLRIPSAEGRTKVFSTCLPHLFVATFFLSAAGFEFLRLPSDSSSTVDLVFSVFYTVIPPTLNPVIYSLRNDSMKAALRKMLSKEELPQRKMCLKAMFKL

SEQ ID NO: 661 - DNA, 951 bp, Homo sapiens
  CDS (1)..(951)
atggagaatgtcactacaatgaatgagtttcttctacttggcctgactggtgttcaggagctgcagcctttcttctttgggattttcttaatcatttacctgataaacttgattggaaatggatctatattggtgatggttgttttggaaccacaactccactcccctatgtatttttttctgggaaacctttcttgtctggatatttcttattcttcagtgacactgcccaagctgctcgtaaacctcgtgtgcagtcgcagggctatatcttttctaggctgtatcacccagctacacttcttccactttttgggaagcacagaggccattttactggctatcatggcctttgaccgttttgttgccatctgcaatcctcttcgctacactgtcatcatgaacccccaggtgtgtattctgttggcagctgcggcctggctcatcagcttcttttacgctctgatgcattctgtcatgactgcacacctgagtttttgtggctctcagaaactcaatcacttcttctacgatgtcaagccgctcttagaattggcctgtagtgacacattactcaatcaatggcttctttccattgtcacaggcagcatatccatgggagctttctttctgactcttctctcctgcttctatgtaattggcttccttctgtttaagaacaggtcctgcagaatactccacaaggctctgtccacttgtgcctcccattttatggtggtatgtcttttctatggacctgtgggcttcacatatattcgtcctgcttcagccacctccatgattcaggaccggataatggccatcatgtatagcgccgtcacccctgtactgaatccactaatctacacccttaggaacaaagaagtgatgatggctctgaagaaaatctttggtaggaagttgtttaaagactggcagcaacaccactag

SEQ ID NO: 662 - protein, 316 aa, Homo sapiens
MENVTTMNEFLLLGLTGVQELQPFFFGIFLIIYLINLIGNGSILVMVVLEPQLHSPMYFFLGNLSCLDISYSSVTLPKLLVNLVCSRRAISFLGCITQLHFFHFLGSTEAILLAIMAFDRFVAICNPLRYTVIMNPQVCILLAAAAWLISFFYALMHSVMTAHLSFCGSQKLNHFFYDVKPLLELACSDTLLNQWLLSIVTGSISMGAFFLTLLSCFYVIGFLLFKNRSCRILHKALSTCASHFMVVCLFYGPVGFTYIRPASATSMIQDRIMAIMYSAVTPVLNPLIYTLRNKEVMMALKKIFGRKLFKDWQQHH

SEQ ID NO: 663 - DNA, 966 bp, Homo sapiens
  CDS (1)..(966)
atggaaagaaagaatcaaacagctataactgaattcatcatcttgggattctccaacctaaatgaattgcagtttttactattcaccatcttctttctgacttatttctgtactttgggaggaaatatattaattatcttgacgactgtgactgatccacacctgcatacacctatgtattattttctagggaacttggcctttattgacatctgctacaccaccagcaatgtcccccagatgatggtgcacctcctctcaaagaaaaaaagcatttcttatgtggggtgtgtggttcaactttttgcatttgttttctttgtaggatcagagtgtctcctactggcagcaatggcatatgatcgttacattgcaatctgcaatcctttaaggtattcagttattctgagcaaggttctatgcaatcaattagcagcctcatgctgggctgctggtttccttaactcagtggtgcatacagtgttgacattctgcctgcccttctgtggcaacaatcagattaattacttcttctgtgacatcccccctttgctgatcttgtcttgtggaaacacttctgtcaatgagttggcactgctatccactggggtcttcattggttggactcctttcctttgtatcgtactttcctacatttgcataatctccaccatcttgaggatccagtcctcagagggaagacgaaaagccttttctacatgtgcctcccacctggccattgtctttctcttttatggcagcgccatctttacatatgtacggcccatctcaacttactcattaaagaaagataggttggtttcagtgttgtacagtgttgttacccccatgctaaaccctataatttacacattgaggaataaggacatcaaagaagctgtcaaaactatagggagcaagtggcagccaccaatttcctctttggatagtaaactcacttattga

SEQ ID NO: 664 - protein, 321 aa, Homo sapiens
MERKNQTAITEFIILGFSNLNELQFLLFTIFFLTYFCTLGGNILIILTTVTDPHLHTPMYYFLGNLAFIDICYTTSNVPQMMVHLLSKKKSISYVGCVVQLFAFVFFVGSECLLLAAMAYDRYIAICNPLRYSVILSKVLCNQLAASCWAAGFLNSVVHTVLTFCLPFCGNNQINYFFCDIPPLLILSCGNTSVNELALLSTGVFIGWTPFLCIVLSYICIISTILRIQSSEGRRKAFSTCASHLAIVFLFYGSAIFTYVRPISTYSLKKDRLVSVLYSVVTPMLNPIIYTLRNKDIKEAVKTIGSKWQPPISSLDSKLTY

SEQ ID NO: 665 - DNA, 1002 bp, Homo sapiens
  CDS (1)..(1002)
atgttgactctaactcgcatccgcactgtgtcctatgaagtcaggagtacatttctgttcatttcagtcctggagtttgcagtggggtttctgaccaatgccttcgttttcttggtgaatttttgggatgtagtgaagaggcaggcactgagcaacagtgattgtgtgctgctgtgtctcagcatcagccggcttttcctgcatggactgctgttcctgagtgctatccagcttacccacttccagaagttgagtgaaccactgaaccacagctaccaagccatcatcatgctatggatgattgcaaaccaagccaacctctggcttgctgcctgcctcagcctgctttactgctccaagctcatccgtttctctcacaccttcctgatctgcttggcaagctgggtctccaggaagatctcccagatgctcctgggtattattctttgctcctgcatctgcactgtcctctgtgtttggtgcttttttagcagacctcacttcacagtcacaactgtgctattcatgaataacaatacaaggctcaactggcagattaaagatctcaatttattttattcctttctcttctgctatctgtggtctgtgcctcctttcctattgtttctggtttcttctgggatgctgactgtctccctgggaaggcacatgaggacaatgaaggtctataccagaaactctcgtgaccccagcctggaggcccacattaaagccctcaagtctcttgtctcctttttctgcttctttgtgatatcatcctgtgttgccttcatctctgtgcccctactgattctgtggcgcgacaaaataggggtgatggtttgtgttgggataatggcagcttgtccctctgggcatgcagccatcctgatctcaggcaatgccaagttgaggagagctgtgatgaccattctgctctgggctcagagcagcctgaaggtaagagccgaccacaaggcagattcccggacactgtgctga

SEQ ID NO: 666 - protein, 333 aa, Homo sapiens
MLTLTRIRTVSYEVRSTFLFISVLEFAVGFLTNAFVFLVNFWDVVKRQALSNSDCVLLCLSISRLFLHGLLFLSAIQLTHFQKLSEPLNHSYQAIIMLWMIANQANLWLAACLSLLYCSKLIRFSHTFLICLASWVSRKISQMLLGIILCSCICTVLCVWCFFSRPHFTVTTVLFMNNNTRLNWQIKDLNLFYSFLFCYLWSVPPFLLFLVSSGMLTVSLGRHMRTMKVYTRNSRDPSLEAHIKALKSLVSFFCFFVISSCVAFISVPLLILWRDKIGVMVCVGIMAACPSGHAAILISGNAKLRRAVMTILLWAQSSLKVRADHKADSRTLC

SEQ ID NO: 667 - DNA, 960 bp, Homo sapiens
  CDS (1)..(960)
atgataacttttctgcccatcattttttccattctaatagtggttatatttgtgattggaaattttgctaatggcttcatagcattggtaaattccattgagtgggtcaagagacaaaagatctcctttgttgaccaaattctcactgctctggcggtctccagagttggtttgctctgggtgttattactacattggtatgcaactcagttgaatccagctttttatagtgtagaagtaagaattactgcttataatgtctgggcagtaaccaaccatttcagcagctggcttgctactagcctcagcatgttttatttgctcaggattgccaatttctccaaccttatttttcttcgcataaagaggagagttaagagtgttgttctggtgatactgttggggcctttgctatttttggtttgtcatctttttgtgataaacatggatgagactgtatggacaaaagaatatgaaggaaacgtgacttggaagatcaaattgaggagtgcaatgtaccattcaaatatgactctaaccatgctagcaaactttgtacccctcactctgaccctgatatcttttctgctgttaatctgttctctgtgtaaacatctcaagaagatgcagctccatggcaaaggatctcaagatcccagcaccaaggtccacataaaagctttgcaaactgtgacctcctttcttctgttatgtgccatttactttctgtccatgatcatatcagtttgtaatttggggaggctggaaaagcaacctgtcttcatgttctgccaagctattatattcagctatccttcaacccacccattcatcctgattttgggaaacaagaagctaaagcagatttttctttcagttttgcggcatgtgaggtactgggtgaaagacagaagccttcgtctccatagattcacaagaggggcattgtgtgtcttctag

SEQ ID NO: 668 - protein, 319 aa, Homo sapiens
MITFLPIIFSILIVVIFVIGNFANGFIALVNSIEWVKRQKISFVDQILTALAVSRVGLLWVLLLHWYATQLNPAFYSVEVRITAYNVWAVTNHFSSWLATSLSMFYLLRIANFSNLIFLRIKRRVKSVVLVILLGPLLFLVCHLFVINMDETVWTKEYEGNVTWKIKLRSAMYHSNMTLTMLANFVPLTLTLISFLLLICSLCKHLKKMQLHGKGSQDPSTKVHIKALQTVTSFLLLCAIYFLSMIISVCNLGRLEKQPVFMFCQAIIFSYPSTHPFILILGNKKLKQIFLSVLRHVRYWVKDRSLRLHRFTRGALCVF

SEQ ID NO: 669 - DNA, 900 bp, Homo sapiens
  CDS (1)..(900)
atgataacttttctgcccatcatattttccattctagtagtggttacatttgttattggaaattttgctaatggcttcatagcgttggtaaattccaccgagtgggtgaagagacaaaagatctcctttgctgaccaaattgtcactgctctggcggtctccagagttggtttgctctgggtgttattattaaattggtattcaactgtgttgaatccagctttttatagtgtagaattaagaactactgcttataatatctgggcagtaaccggccatttcagcaactggcctgctactagcctcagcatattttatttgctcaagattgccaatttctccaaccttatttttcttcgcttaaagaggagagttaagagtgtcattctggtggtgctgttggggcctttgctatttttggcttgtcatctttttgtggtaaacatgaatcagattgtatggacaaaagaatatgaaggaaacatgacttggaagatcaaattgaggcgtgcaatgtacctttcagatacgactgtaaccatgctagcaaacttagtaccctttactgtaaccctgatatcttttctgctgttagtctgttctctgtgtaaacatctcaagaagatgcagctccatggcaaaggatctcaagatcccagtaccaaggtccacataaaagttttgcaaactgtgatctccttcttcttgttatgtgccatttactttgtgtctgtaataatatcagtttggagttttaagaatctggaaaacaaacctgtcttcatgttctgccaagctattggattcagctgttcttcagcccacccgttcatcctgatttggggaaacaagaagctaaagcagacttatctttcagttttgtggcaaatgaggtactga

SEQ ID NO: 670 - protein, 299 aa, Homo sapiens [sequence omitted]

SEQ ID NO: 671 - DNA, 945 bp, Homo sapiens
  CDS (1)..(945)
atggccaccgaattggacaaaatctttctgattctggcaatagcagaattcatcatcagcatgctggggaatgtgttcattggactggtaaactgctctgaagggatcaagaaccaaaaggtcttctcagctgacttcatcctcacctgcttggctatctccacaattggacaactgttggtgatactgtttgattcatttctagtgggacttgcttcacatttatataccacatatagactaggaaaaactgttattatgctttggcacatgactaatcacttgacaacctggcttgccacctgcctaagcattttctatttctttaagatagcccacttcccccactcccttttcctctggctgaggtggaggatgaacggaatgattgttatgcttcttatattgtctttgttcttactgatttttgacagtttagtgctagaaatatttattgatatctcactcaatataatagataaaagtaatctgactttatatttagatgaaagtaaaactctctatgataaactctctattttaaaaactcttctcagcttgaccagttttatccccttttctctgttcctgacctccttgctttttttatttctgtccttggtgagacatactagaaatttgaagctcagttccttgggctctagagactccagcacagaggcccataggagggccatgaaaatggtgatgtctttccttttcctcttcatagttcattttttttccttacaagtggccaattggatattttttatgttgtggaacaacaagtgcataaagtttgtcatgttagccttaaatgcctttccctcgtgccactcatttattctcattctgggaaacagcaagctgcaacagacagctgtgaggctactgtggcatcttaggaactatacaaaaacaccaaaccctttacctttgtag

SEQ ID NO: 672 - protein, 314 aa, Homo sapiens
MATELDKIFLILAIAEFIISMLGNVFIGLVNCSEGIKNQKVFSADFILTCLAISTIGQLLVILFDSFLVGLASHLYTTYRLGKTVIMLWHMTNHLTTWLATCLSIFYFFKIAHFPHSLFLWLRWRMNGMIVMLLILSLFLLIFDSLVLEIFIDISLNIIDKSNLTLYLDESKTLYDKLSILKTLLSLTSFIPFSLFLTSLLFLFLSLVRHTRNLKLSSLGSRDSSTEAHRRAMKMVMSFLFLFIVHFFSLQVANWIFFMLWNNKCIKFVMLALNAFPSCHSFILILGNSKLQQTAVRLLWHLRNYTKTPNPLPL

SEQ ID NO: 673 - DNA, 972 bp, Homo sapiens
  CDS (1)..(972)
atggcaacggtgaacacagatgccacagataaagacatatccaagttcaaggtcaccttcactttggtggtctccggaatagagtgcatcactggcatccttgggagtggcttcatcacggccatctatggggctgagtgggccaggggcaaaacactccccactggtgaccgcattatgttgatgctgagcttttccaggctcttgctacagatttggatgatgctggagaacattttcagtctgctattccgaattgtttataaccaaaactcagtgtatatcctcttcaaagtcatcactgtctttctgaaccattccaatctctggtttgctgcctggctcaaagtcttctattgtcttagaattgcaaacttcaatcatcctttgttcttcctgatgaagaggaaaatcatagtgctgatgccttggcttctcaggctgtcagtgttggtttccttaagcttcagctttcctctctcgagagatgtcttcaatgtgtatgtgaatagctccattcctatcccctcctccaactccacggagaagaagtacttctctgagaccaatatggtcaacctggtatttttctataacatggggatcttcgttcctctgatcatgttcatcctggcagccaccctgctgatcctctctctcaagagacacaccctacacatgggaagcaatgccacagggtccagggaccccagcatgaaggctcacataggggccatcaaagccaccagctactttctcatcctctacattttcaatgcaattgctctatttctttccacgtccaacatctttgacacttacagttcctggaatattttgtgcaagatcatcatggctgcctaccctgccggccactcagtacaactgatcttgggcaaccctgggctgagaagagcctggaagcggtttcagcaccaagttcctctttacctaaaagggcagactctgtga

SEQ ID NO: 674 - protein, 323 aa, Homo sapiens
MATVNTDATDKDISKFKVTFTLVVSGIECITGILGSGFITAIYGAEWARGKTLPTGDRIMLMLSFSRLLLQIWMMLENIFSLLFRIVYNQNSVYILFKVITVFLNHSNLWFAAWLKVFYCLRIANFNHPLFFLMKRKIIVLMPWLLRLSVLVSLSFSFPLSRDVFNVYVNSSIPIPSSNSTEKKYFSETNMVNLVFFYNMGIFVPLIMFILAATLLILSLKRHTLHMGSNATGSRDPSMKAHIGAIKATSYFLILYIFNAIALFLSTSNIFDTYSSWNILCKIIMAAYPAGHSVQLILGNPGLRRAWKRFQHQVPLYLKGQTL

SEQ ID NO: 675 - DNA, 1017 bp, Homo sapiens
  CDS (1)..(1017)
atgctagggagatgttttcctccagacaccaaagagaagcaacagctcagaatgactaaactctgcgatcctgcagaaagtgaattgtcgccatttctcatcaccttaattttagcagttttacttgctgaatacctcattggtatcattgcaaatggtttcatcatggctatacatgcagctgaatgggttcaaaataaggcagtttccacaagtggcaggatcctggttttcctgagtgtatccagaatagctctccaaagcctcatgatgttagaaattaccatcagctcaacctccctaagtttttattctgaagacgctgtatattatgcattcaaaataagttttatattcttaaatttttgtagcctgtggtttgctgcctggctcagtttcttctactttgtgaagattgccaatttctcctacccccttttcctcaaactgaggtggagaattactggattgataccctggcttctgtggctgtccgtgtttatttccttcagtcacagcatgttctgcatcaacatctgcactgtgtattgtaacaattctttccctatccactcctccaactccactaagaaaacatacttgtctgagatcaatgtggtcggtctggcttttttctttaacctggggattgtgactcctctgatcatgttcatcctgacagccaccctgctgatcctctctctcaagagacacaccctacacatgggaagcaatgccacagggtccaacgaccccagcatggaggctcacatgggggccatcaaagctatcagctactttctcattctctacattttcaatgcagttgctctgtttatctacctgtccaacatgtttgacatcaacagtctgtggaataatttgtgccagatcatcatggctgcctaccctgccagccactcaattctactgattcaagataaccctgggctgagaagagcctggaagcggcttcagcttcgacttcatctttacccaaaagagtggactctgtga

SEQ ID NO: 676 - protein, 338 aa, Homo sapiens
MLGRCFPPDTKEKQQLRMTKLCDPAESELSPFLITLILAVLLAEYLIGIIANGFIMAIHAAEWVQNKAVSTSGRILVFLSVSRIALQSLMMLEITISSTSLSFYSEDAVYYAFKISFIFLNFCSLWFAAWLSFFYFVKIANFSYPLFLKLRWRITGLIPWLLWLSVFISFSHSMFCINICTVYCNNSFPIHSSNSTKKTYLSEINVVGLAFFFNLGIVTPLIMFILTATLLILSLKRHTLHMGSNATGSNDPSMEAHMGAIKAISYFLILYIFNAVALFIYLSNMFDINSLWNNLCQIIMAAYPASHSILLIQDNPGLRRAWKRLQLRLHLYPKEWTL

SEQ ID NO: 677 - DNA, 1017 bp, Homo sapiens
  CDS (1)..(1017)
atgctagggagatgttttcctccagacaccaaagagaagcaacagctcagaatgactaaactctgcgatcctgcagaaagtgaattgtcgccatttctcatcaccttaattttagcagttttacttgctgaatacctcattggtatcattgcaaatggtttcatcatggctatacatgcagctgaatgggttcaaaataaggcagtttccacaagtggcaggatcctggttttcctgagtgtatccagaatagctctccaaagcctcatgatgttagaaattaccatcagctcaacctccctaagtttttattctgaagacgctgtatattatgcattcaaaataagttttatattcttaaatttttgtagcctgtggtttgctgcctggctcagtttcttctactttgtgaagattgccaatttctcctacccccttttcctcaaactgaggtggagaattactggattgataccctggcttctgtggctgtccgtgtttatttccttcagtcacagcatgttctgcatcaacatctgcactgtgtattgtaacaattctttccctatccactcctccaactccactaagaaaacatacttgtctgagatcaatgtggtcggtctggcttttttctttaacctggggattgtgactcctctgatcatgttcatcctgacagccaccctgctgatcctctctctcaagagacacaccctacacatgggaagcaatgccacagggtccaacgaccccagcatggaggctcacataggggccatcaaagctatcagctactttctcatcctctacattttcaatgcaattgctctatttctttccacgtccaacatctttgacacttacagttcctggaatattttgtgcaagatcatcatggctgcctaccctgccggccactcagtacaactgatcttgggcaaccctgggctgagaagagcctggaagcggtttcagcaccaagttcctctttacctaaaagggcagactctgtga

SEQ ID NO: 678 - protein, 338 aa, Homo sapiens
MLGRCFPPDTKEKQQLRMTKLCDPAESELSPFLITLILAVLLAEYLIGIIANGFIMAIHAAEWVQNKAVSTSGRILVFLSVSRIALQSLMMLEITISSTSLSFYSEDAVYYAFKISFIFLNFCSLWFAAWLSFFYFVKIANFSYPLFLKLRWRITGLIPWLLWLSVFISFSHSMFCINICTVYCNNSFPIHSSNSTKKTYLSEINVVGLAFFFNLGIVTPLIMFILTATLLILSLKRHTLHMGSNATGSNDPSMEAHIGAIKAISYFLILYIFNAIALFLSTSNIFDTYSSWNILCKIIMAAYPAGHSVQLILGNPGLRRAWKRFQHQVPLYLKGQTL

SEQ ID NO: 679 - DNA, 924 bp, Homo sapiens
  CDS (1)..(924)
atgcaagcagcactgacggccttcttcgtgttgctctttagcctgctgagtcttctggggattgcagcgaatggcttcattgtgctggtgctgggcagggagtggctgcgatatggcaggttgctgcccttggatatgatcctcattagcttgggtgcctcccgcttctgcctgcagttggttgggacggtgcacaacttctactactctgcccagaaggtcgagtactctgggggtctcggccgacagttcttccatctacactggcacttcctgaactcagccaccttctggttttgcagctggctcagtgtcctgttctgtgtgaagattgctaacatcacacactccaccttcctgtggctgaagtggaggttcccagggtgggtgccctggctcctgttgggctctgtcctgatctccttcatcataaccctgctgtttttttgggtgaactaccctgtatatcaagaatttttaattagaaaattttctgggaacatgacctacaagtggaatacaaggatagaaacatactatttcccatccctgaaactggtcatctggtcaattcctttttctgtttttctggtctcaattatgctgttaattaattctctgaggaggcatactcagagaatgcagcacaacgggcacagcctgcaggaccccagcacccaggctcacaccagagctctgaagtccctcatctccttcctcattctttatgctctgtcctttctgtccctgatcattgatgccgcaaaatttatctccatgcagaacgacttttactggccatggcaaattgcagtctacctgtgcatatctgtccatcccttcatcctcatcttcagcaacctcaagcttcgaagcgtgttctcgcagctcctgttgttggcaaggggcttctgggtggcctag

SEQ ID NO: 680 - protein, 307 aa, Homo sapiens
MQAALTAFFVLLFSLLSLLGIAANGFIVLVLGREWLRYGRLLPLDMILISLGASRFCLQLVGTVHNFYYSAQKVEYSGGLGRQFFHLHWHFLNSATFWFCSWLSVLFCVKIANITHSTFLWLKWRFPGWVPWLLLGSVLISFIITLLFFWVNYPVYQEFLIRKFSGNMTYKWNTRIETYYFPSLKLVIWSIPFSVFLVSIMLLINSLRRHTQRMQHNGHSLQDPSTQAHTRALKSLISFLILYALSFLSLIIDAAKFISMQNDFYWPWQIAVYLCISVHPFILIFSNLKLRSVFSQLLLLARGFWVA

SEQ ID NO: 681 - DNA, 930 bp, Homo sapiens
  CDS (1)..(930)
atgataacttttctacccatcattttttccagtctggtagtggttacatttgttattggaaattttgctaatggcttcatagcactggtaaattccattgagtggttcaagagacaaaagatctcctttgctgaccaaattctcactgctctggcggtctccagagttggtttgctctgggtattattattaaactggtattcaactgtgttgaatccagcttttaatagtgtagaagtaagaactactgcttataatatctgggcagtgatcaaccatttcagcaactggcttgctactaccctcagcatattttatttgctcaagattgccaatttctccaactttatttttcttcacttaaagaggagagttaagagtgtcattctggtgatgttgttggggcctttgctatttttggcttgtcatctttttgtgataaacatgaatgagattgtgcggacaaaagaatttgaaggaaacatgacttggaagatcaaattgaagagtgcaatgtacttttcaaatatgactgtaaccatggtagcaaacttagtacccttcactctgaccctactatcttttatgctgttaatctgttctttgtgtaaacatctcaagaagatgcagctccatggtaaaggatctcaagatcccagcaccaaggtccacataaaagctttgcaaactgtgatctccttcctcttgttatgtgccatttactttctgtccataatgatatcagtttggagttttggaagtctggaaaacaaacctgtcttcatgttctgcaaagctattagattcagctatccttcaatccacccattcatcctgatttggggaaacaagaagctaaagcagacttttctttcagttttttggcaaatgaggtactgggtgaaaggagagaagacttcatctccatag

SEQ ID NO: 682 - protein, 309 aa, Homo sapiens
MITFLPIIFSSLVVVTFVIGNFANGFIALVNSIEWFKRQKISFADQILTALAVSRVGLLWVLLLNWYSTVLNPAFNSVEVRTTAYNIWAVINHFSNWLATTLSIFYLLKIANFSNFIFLHLKRRVKSVILVMLLGPLLFLACHLFVINMNEIVRTKEFEGNMTWKIKLKSAMYFSNMTVTMVANLVPFTLTLLSFMLLICSLCKHLKKMQLHGKGSQDPSTKVHIKALQTVISFLLLCAIYFLSIMISVWSFGSLENKPVFMFCKAIRFSYPSIHPFILIWGNKKLKQTFLSVFWQMRYWVKGEKTSSP

SEQ ID NO: 683 - DNA, 759 bp, Homo sapiens
  CDS (1)..(759)
atggtatattttctgctcatcattttatcaattctggtagtgtttgcatttgttcttggaaatttttccaatggcttcatagctctagtaaatgtcattgactgggttaagacacgaaagatctcctcagctgaccaaatcctcactgctctggtggtctccagaattggtttactctgggtcatattattacattggtatgcaaatgtgtttaattcagctttatatagttcagaagtaggagctgttgcttctaatatctcagcaataatcaaccatttcagcatctggcttgctgctagcctcagcatattttatttgctcaagattgccaatttctccaaccttatttttctccacctaaagaagagaattaggagtgttgttctggtgatactgttgggtcccttggtatttttgatttgtaatcttgctgtgataaccatggatgacagtgtgtggacaaaagaatatgaaggaaatgtgacttggaagatcaaattgaggaatgcaatacacctttcaaacttgactgtaagcacactagcaaacctcatacccttcattctgaccctaatatgttttctgctgttaatctgttctctgcataaacatctcaagaagatgcagctccatggcaaaggatctcaagatctcagcaccaaggtccacataaaagctttgcaaactgtgatctccttcctcatgttatatgccatttactttctgtatctaatcacattaacctggaatctttga

SEQ ID NO: 684 - protein, 252 aa, Homo sapiens
MVYFLLIILSILVVFAFVLGNFSNGFIALVNVIDWVKTRKISSADQILTALVVSRIGLLWVILLHWYANVFNSALYSSEVGAVASNISAIINHFSIWLAASLSIFYLLKIANFSNLIFLHLKKRIRSVVLVILLGPLVFLICNLAVITMDDSVWTKEYEGNVTWKIKLRNAIHLSNLTVSTLANLIPFILTLICFLLLICSLHKHLKKMQLHGKGSQDLSTKVHIKALQTVISFLMLYAIYFLYLITLTWNL

SEQ ID NO: 685 - DNA, 957 bp, Homo sapiens
  CDS (1)..(957)
atgttaaaggactcagaacaagtgttactaagcctgcatttttttatctgttcaaacatgatgtgttttctgctcatcatttcatcaattctggtagtgtttgcatttgttcttggaaatgttgccaatggcttcatagccctagtaaatgtcattgactgggttaacacacgaaagatctcctcagctgagcaaattctcactgctctggtggtctccagaattggtttactctgggtcatgttattcctttggtatgcaactgtgtttaattctgctttatatggtttagaagtaagaattgttgcttctaatgcctgggctgtaacgaaccatttcagcatgtggcttgctgctagcctcagcatattttgtttgctcaagattgccaatttctccaaccttatttctctccacctaaagaagagaattaagagtgttgttctggtgatactgttggggcccttggtatttctgatttgtaatcttgctgtgataaccatggatgagagagtgtggacaaaagaatatgaaggaaatgtgacttggaagatcaaattgaggaatgcaatacacctttcaagcttgactgtaactactctagcaaacctcataccctttactctgagcctaatatgttttctgctgttaatctgttctctttgtaaacatctcaagaagatgcggctccatagcaaaggatctcaagatcccagcaccaaggtccatataaaagctttgcaaactgtgacctccttcctcatgttatttgccatttactttctgtgtataatcacatcaacttggaatcttaggacacagcagagcaaacttgtactcctgctttgccaaactgttgcaatcatgtatccttcattccactcattcatcctgattatgggaagtaggaagctaaaacagacctttctttcagttttgtggcagatgacacgctga

SEQ ID NO: 686 - protein, 318 aa, Homo sapiens
MLKDSEQVLLSLHFFICSNMMCFLLIISSILVVFAFVLGNVANGFIALVNVIDWVNTRKISSAEQILTALVVSRIGLLWVMLFLWYATVFNSALYGLEVRIVASNAWAVTNHFSMWLAASLSIFCLLKIANFSNLISLHLKKRIKSVVLVILLGPLVFLICNLAVITMDERVWTKEYEGNVTWKIKLRNAIHLSSLTVTTLANLIPFTLSLICFLLLICSLCKHLKKMRLHSKGSQDPSTKVHIKALQTVTSFLMLFAIYFLCIITSTWNLRTQQSKLVLLLCQTVAIMYPSFHSFILIMGSRKLKQTFLSVLWQMTR

SEQ ID NO: 687 - DNA, 930 bp, Homo sapiens
  CDS (1)..(930)
atgatgagttttctacacattgttttttccattctagtagtggttgcatttattcttggaaattttgccaatggctttatagcactgataaatttcattgcctgggtcaagagacaaaagatctcctcagctgatcaaattattgctgctctggcagtctccagagttggtttgctctgggtaatattattacattggtattcaactgtgttgaatccaacttcatctaatttaaaagtaataatttttatttctaatgcctgggcagtaaccaatcatttcagcatctggcttgctactagcctcagcatattttatttgctcaagatcgtcaatttctccagacttatttttcatcacttaaaaaggaaggctaagagtgtagttctggtgatagtgttggggtctttgttctttttggtttgtcaccttgtgatgaaacacacgtatataaatgtgtggacagaagaatgtgaaggaaacgtaacttggaagatcaaactgaggaatgcaatgcacctttccaacttgactgtagccatgctagcaaacttgataccattcactctgaccctgatatcttttctgctgttaatctactctctgtgtaaacatctgaagaagatgcagctccatggcaaaggatctcaagatcccagcaccaagatccacataaaagctctgcaaactgtgacctccttcctcatattacttgccatttactttctgtgtctaatcatatcgttttggaattttaagatgcgaccaaaagaaattgtcttaatgctttgccaagcttttggaatcatatatccatcattccactcattcattctgatttgggggaacaagacgctaaagcagacctttctttcagttttgtggcaggtgacttgctgggcaaaaggacagaaccagtcaactccatag

SEQ ID NO: 688 - protein, 309 aa, Homo sapiens
MMSFLHIVFSILVVVAFILGNFANGFIALINFIAWVKRQKISSADQIIAALAVSRVGLLWVILLHWYSTVLNPTSSNLKVIIFISNAWAVTNHFSIWLATSLSIFYLLKIVNFSRLIFHHLKRKAKSVVLVIVLGSLFFLVCHLVMKHTYINVWTEECEGNVTWKIKLRNAMHLSNLTVAMLANLIPFTLTLISFLLLIYSLCKHLKKMQLHGKGSQDPSTKIHIKALQTVTSFLILLAIYFLCLIISFWNFKMRPKEIVLMLCQAFGIIYPSFHSFILIWGNKTLKQTFLSVLWQVTCWAKGQNQSTP

SEQ ID NO: 689 - DNA, 771 bp, Homo sapiens
  CDS (1)..(771)
atgataacttttctacccatcattttttccattctagtagtggttacatttgttcttgggaattttgctaatggcttcatagtgttggtaaattccattgagtgggtcaagagacaaaagatctcctttgctgaccaaattctcactgctctggcagtctccagagttggtttgctctgggtaatattattacattggtatgcaactgttttgaatccaggttcatatagtttaggagtaagaattactactattaatgcctgggctgtaaccaaccatttcagcatctgggttgctactagcctcagcatattttatttcctcaagattgccaatttctccaactttatttttcttcacttaaaaaggagaattaagagtgtcattccagtgatactattggggtctttgttatttttggtttgtcatcttgttgtggtaaacatggatgagagtatgtggacaaaagaatatgaaggaaacgtgagttgggagatcaaattgagtgatccgacgcacctttcagatatgactgtaaccacgcttgcaaacttaataccctttactctgtccctgttatcttttctgctcttaatctgttctttgtgtaaacatctcaagaagatgcagttccatggcaaaggatctccagattccaacaccaaggtccacataaaagctttgcaaacggtgacctccttcctcttgttatttgctgtttactttctgtccctaatcacatcgatttggaattttaggaggaggctgtag

SEQ ID NO: 690 - protein, 256 aa, Homo sapiens [sequence omitted]

SEQ ID NO: 691 - DNA, 930 bp, Homo sapiens
  CDS (1)..(930)
atgacaacttttatacccatcattttttccagtgtggtagtggttctatttgttattggaaattttgctaatggcttcatagcattggtaaattccattgagcgggtcaagagacaaaagatctcttttgctgaccagattctcactgctctggcggtctccagagttggtttgctctgggtattattattaaattggtattcaactgtgtttaatccagctttttatagtgtagaagtaagaactactgcttataatgtctgggcagtaaccggccatttcagcaactggcttgctactagcctcagcatattttatttgctcaagattgccaatttctccaaccttatttttcttcacttaaagaggagagttaagagtgtcattctggtgatgctgttggggcctttactatttttggcttgtcaactttttgtgataaacatgaaagagattgtacggacaaaagaatatgaaggaaacttgacttggaagatcaaattgaggagtgcagtgtacctttcagatgcgactgtaaccacgctaggaaacttagtgcccttcactctgaccctgctatgttttttgctgttaatctgttctctgtgtaaacatctcaagaagatgcagctccatggtaaaggatctcaagatcccagcaccaaggtccacataaaagctttgcaaactgtgatctttttcctcttgttatgtgccgtttactttctgtccataatgatatcagtttggagttttgggagtctggaaaacaaacctgtcttcatgttctgcaaagctattagattcagctatccttcaatccacccattcatcctgatttggggaaacaagaagctaaagcagacttttctttcagttttgcggcaagtgaggtactgggtgaaaggagagaagccttcatctccatag

SEQ ID NO: 692 - protein, 309 aa, Homo sapiens
MTTFIPIIFSSVVVVLFVIGNFANGFIALVNSIERVKRQKISFADQILTALAVSRVGLLWVLLLNWYSTVFNPAFYSVEVRTTAYNVWAVTGHFSNWLATSLSIFYLLKIANFSNLIFLHLKRRVKSVILVMLLGPLLFLACQLFVINMKEIVRTKEYEGNLTWKIKLRSAVYLSDATVTTLGNLVPFTLTLLCFLLLICSLCKHLKKMQLHGKGSQDPSTKVHIKALQTVIFFLLLCAVYFLSIMISVWSFGSLENKPVFMFCKAIRFSYPSIHPFILIWGNKKLKQTFLSVLRQVRYWVKGEKPSSP

SEQ ID NO: 693 - DNA, 900 bp, Homo sapiens
  CDS (1)..(900)
atgataacttttctatacatttttttttcaattctaataatggttttatttgttctcggaaactttgccaatggcttcatagcactggtaaatttcattgactgggtgaagagaaaaaagatctcctcagctgaccaaattctcactgctctggcggtctccagaattggtttgctctgggcattattattaaattggtatttaactgtgttgaatccagctttttatagtgtagaattaagaattacttcttataatgcctgggttgtaaccaaccatttcagcatgtggcttgctgctaacctcagcatattttatttgctcaagattgccaatttctccaaccttctttttcttcatttaaagaggagagttaggagtgtcattctggtgatactgttggggactttgatatttttggtttgtcatcttcttgtggcaaacatggatgagagtatgtgggcagaagaatatgaaggaaacatgactgggaagatgaaattgaggaatacagtacatctttcatatttgactgtaactaccctatggagcttcataccctttactctgtccctgatatcttttctgatgctaatctgttctctgtgtaaacatctcaagaagatgcagctccatggagaaggatcgcaagatctcagcaccaaggtccacataaaagctttgcaaactctgatctccttcctcttgttatgtgccattttctttctattcctaatcgtttcggtttggagtcctaggaggctgcggaatgacccggttgtcatggttagcaaggctgttggaaacatatatcttgcattcgactcattcatcctaatttggagaaccaagaagctaaaacacacctttcttttgattttgtgtcagattaggtgctga

SEQ ID NO: 694 - protein, 299 aa, Homo sapiens
MITFLYIFFSILIMVLFVLGNFANGFIALVNFIDWVKRKKISSADQILTALAVSRIGLLWALLLNWYLTVLNPAFYSVELRITSYNAWVVTNHFSMWLAANLSIFYLLKIANFSNLLFLHLKRRVRSVILVILLGTLIFLVCHLLVANMDESMWAEEYEGNMTGKMKLRNTVHLSYLTVTTLWSFIPFTLSLISFLMLICSLCKHLKKMQLHGEGSQDLSTKVHIKALQTLISFLLLCAIFFLFLIVSVWSPRRLRNDPVVMVSKAVGNIYLAFDSFILIWRTKKLKHTFLLILCQIRC
